United States Patent Application Publication US 2023/0390346 A1 - sequence listing, part 14

SEQ ID NO: 261 - DNA, 4063573 bp, Bacillus amyloliquefaciens (residues 2,031,788-4,063,573 of 4,063,573)
ttttcacttgtttatgcaatcggaacgcctgtcatgatggcccttacagcaaaactggacagaaggaagctcatgatctatgctcttggattgtttgtaatcggaaatatcatttcatttcttgtacagggatacggcttatttgcggcagcccgggtgatcatggcgcttggagcaggaactgtggtggtcaccgcgcttacgatcgcagcaaaaatcgctcccccgggaaaacaggcaagttctctcgcgaccgtcattatggggtttacggcggcgctcattatcggtgttccgatcggaagaaccgtgtctgaagcttttggctggaaggtggttttcgccggaattgcggcaatcggaatcattgccatgcttattatacgttttgcgttgcctgagataaaaggagataaaccggtgccgcttattcagcaattttctcttttgaagaaacgaaaggtggctgtcgggcttgctattacgtttttttggctcggaggctattcggttgcgtatacgtacctttctccgtatttactgaacgtcactcatatcggcagcggaatactgagtacattgctgcttattttcggtgttgctagtcttgccggttctaaagcaggcggtttcagtgctgacaaatggggggcgcgtatgacattaaccggcggaatggcgcttcatgctatcatgctcatgttattgccgtttgtcacacattctgctttcggagcggcggcagtgcttattttttggtccttcgccgcctggtcatcaggacctgctcagcagtatcatttggcaacgatggagcctgaatcatcgggtgtattacttggcctcaaccagtctgtgatgcagctggctatggcggccggggcgggcatcgggggcattgttgtcactcatctgtctcttgcgtcagtgacatggatcggatcagcgggtgttgtcatcgcgatgtgcggcgtgctttcacttgcctcgttaacatctgaaaaaccctcatctgaatacagtgcagaataaacaaaagcctcatttctcagcttgagaaacgaggctttttgcctagttattttttatattgtttcaagtttacgccgattgcggctccgtttcggcttgagtcggcaactccggtaaaggtgccgttttcacgatcgatcaggatgctttgcacattaccgatatcaaccgggctgctgccgaatttatgccccatttcgttcagttttgtgcgggcttcttccggcactcctttttcatatctataggatgtcatgctgtttgtgtaaattctcggctcttcgaccgccgctttcagatccatgccgtactcgactttgttcaggatcgtttgcaggacggaagaaataatcgttgctccgccgggagagccgacagtcaggacaggttcgttatttttgaataaaatagtcggagtcatgctgctgagcggacgtttattcggctgcacttcatttgcgccgccaggcaccgcatcgaagtctgttaactcattattcaacacaacgccgtatccgggaaccataatgccggaaccgaacagctgttcaatcgttgtcgtataagatacgacattgccgaagcggtcggttaccgtgaagtgggtcgtttggccttcttgtttgtcagtcggctgcttcacttgtttatagtttgcagaaccttcctgataggcccaagggtcgccggctttcggttttttattgactttatcaatatctatcagctgtctgcgggcattgatataatctggattcaagaggcctttgagagggacgttgacgaattctggatccccggcaaatgcggcgcggtcagcataagccaaatgcatcgtttctgcgagaagctgatatttttgccaagaacggatatcatattgagaaagcttaaaatcatccagaaggttcagcatttgcaacaggaaaacaccgcccgagcttggaggaggagcagttgcgatatgatagccctggtaatccccccagatcggttcgtcaatcgtcacattgaagtttttgatatctttttctgtcattgagccgccgaattcctgcactgtttccgcaagctttttggagaatgcaccgtcatagaatgcttttgtgcctttgtacttaatagctgtaaatgttttggctaagtctttttggatgagtgtgtctccttctttcagaggttctccgtccggaagaaacacgtcttttgcagcggtgtgtgataatttgtttttataatctgagatggcatcagctaaaaccgaatcgatcggaaagccttttgaggcaagtttaatggaaggggtgatgagttgtttcatggagcgtgtgccccatttgtcgagcgctttttcaagtccttttaatgttcccggaacaccgactgcagtccctttagtaacgcgttcggagaaagggatggctttgccgttttcgtcaaggaacatatccggtgctgcgcctgccggtgcgcgttcccggctgtcgataatggtggtgtctttcgtcttcgcatcataaaccatcataaatccgccgccgccgattcccgacatcataggttcagttacgtttaatgcgaattgaatggcgaccgcggcgtcaattgcattgcctccttttttcagcacgtcggcaccgatttgtgaagcgagaggatgggcggtggcaaccatgccgtctttgccgacatctacctgtttgtagtcgtcataggaaaacgggtgtttcttagcctgagcgtgataagggatgcttccggccgtgagcaaagtactgagcagaacgataaaacagagattcataaactttttctttttcatagtctgcctcctttgttttccgcttacaattatagagtaagtaaaatgtgctgttttcacaagtgacaaacggaatagtccggtgcgcaaaaagccggagtttctgtgtgaatgtaatcagtcgcaaataggctaaatgggaaaccgggcagaaaaagctgtgaaacaagcataaagacaaaaaataagctacaataaacaaaacagaattcactcacatgacatatgaaaggaacgtgagccatgtatttaacgatcaaagagacagctgagtttaccagtcttcctgaagaatatgtgcacaatcttgttttgacgaataaaataagggccgtacatgacggacagcaatatttaatcaacaaggaacaatttcaaacccatctcgaacagctggaaaaatataaggaaatgattcaagagtttttaaatgagccgcttcctgaagacattgatgtaaaagatgaagactaggacacaatttcatattgtgtctttttttttcatttttttcggttgctcacaaaaaaacgaatgctcagatttcgttttaagggcgttgtttttcttttttaataccgtgagtctctgttgatttaaaatcccgtcatcgggtcgaaaatgatgttttgaagacttcgatgaaactgcgtgccttattccccttatgtaacactatgtatattatgttacataaggccctttatcctttatcattcaacaggtttcggctataatagtaacataatgctcaatatgttactttaccaattataaggggttttttgatgcatatcgtacagccgatccgaagtttggagaagatccaggaagtcaaacagtatttaatgaagaaaagtgatcgtgattattttttatttattttcggcatgaacagcgcactgcggatttctgatgttctgccgcttcgcgtgagggatgtaaggaacaaagaccatgtgtgggcaaccgaaagcaaaacgagaaagaaaagaaaaattctgatactggagtctttgaaggccgacatatacgcttatacaaaagacatgaaagaggatgactatttgtttaaatcgaaacggacgaataagcccatttcccggattcaggcatacagaatattaaaggaagcagctgccgcgtgcggattggaggaaatcgggacgcatacgcttagaaagacgttcgggtatcatttttatcagaggacaaaagacattgctgaactgcagaggattttgaatcattcttctccgtctattacaatgcgttatatcggaatagatgaagatacgacgagagccgcctataaagtgttcggagggctgtaggcttgaaaaaaacggccgccagcgttactataatagaagcaggctctagtagcacagcggatagtgcagcagtttcctaaactgcaggtcgggagttcgaatctctcctagagcgttttcgacataagataggtgcggattaataatgtcggcaagacagaaaaccccttgttatacaaggggtttttgagtttaatattttgcaagaacctggtggaaatgatgtgaaaaaagcccgctgtaagcaagcgggctttttcttatatgacagcatcaaattgattgactttccaaacgttgttttcttttacgaatgttacatcgcgttttgctgacggtgaaccgtcaagagtcggtacagtgaagcggtatgtttgaacgcttccttttttagaaagaagagtcatttttgcttttttccaattcaggaggttatctccgtcgccgagcggaacagccaatttgccgtcttttacagtgaagtggtaatctttgagccctttgtcaatcgcttgctttgtaaaagcgggtgtcagatattttacggctttcgcttttgttccgaggtctttgcacataaagacgtattgaagattttgatattcaaacggttcagatgtgcagtttgcgtttgatttaagcgcaccgccgctcatcgtgttccagaaatgttctctcgctgacagggccagctgaagtgcttgtttttgtgtaaggtcattaggtgcattttttgcggtcgccgcagtgcccaatgacagaatcaatgtaatagtagtgaggaataatagccattttttcatgatataatctctccttcaatcaatctctttctcttatgttacaaatgttacaataattacgataagattacaataccttttcagaaatattttccggactttttatttttatggtttatttccatgtaagacgtgagaataagataaagagtttcattgaacaaaaggtttttacaagctgtctgctgaataataaaatggaagaaaatcaaaaaaggagtcctacatatggaagtacaagatcatttagaaacagcggaaggccgcggccagtctgtctggcgatcgatgtcactgtttttagtgccgctgcttttaagcaatgtattgcaatctgtcggccaattggtcggaatggtatttgtcggaaggtggctcggagttgatgcgcttgccgccgtatcgtctttttttccgctgttttttctgctgatctcctttacgatcggaatcggttcgggaagttccattctgatcgggcaggcttacggcgcgaaaaacgaagagaggatgaaggcgattgtcggcactacactgacttttacctttatgctcggtgttgttctggcagttgtcggcagtgtgtttacgcttgatattctgcggctgatgggaacgccggaaaacgtaatagatgtcagtgtccgatatgcgcgtattttgttttgcgcaatgccgctgatgtttttatattttgcgtatacgacatttttacgcggaacgggagattcaaagactccgttttatacgttaatcgtcagtacagtcataaacatcggtctcttgcccttattgattctcgggcttttcggacttccgaagttcggcatttacggttcggcgtatgcaaccgtgatttcaaacatcgtgacatttatcgtactcatggtttatttgcggaaaaggaaacatccattggcatttgaccggactgcgctccgttctcttaaaatggacaaaaagctgctcgcgcttttactccgtctcggtattccgtcaagcatcaatatgattctcgtatcactttctgaaattgcggtcatttcatttgtcaatcattacggatcaaacgcgacggctgcttacggggtcgtcaaccaagtggcgagttatgtgcagatgccggcggtaagcctcggtatcgccgtttcaatttttgccgcccaatccattggcgccaatcaattcggccggctgaagcaggtcatcaaagtcggcatcggcctgaattatttgatcggcggggttttgattgtgctgatttacaccttctcccggcagatactggctttgtttttaaccgatcaggatacactccgcattgcccgcaatctgattatgattaccctttggagctatctgattttcggtcacgctcagattgtttcagcaacaatgcgggcgagcggtacggtgttatggccgacgattatcagcatttttacgatttggggaattgaagtgcctgtggcctttattctttctcattatacgaatctcggcattctcggcatttgggtcggttatccggcggcttttgtcgtcagcctgctgctgcaatacggatattaccggtttgtatggaagaaaaaacagattacccggctgattcaataaggttttaccgcacatcgctcagttcatacgggcgatgttttttttagagaaggaaaatgagtttagaaaatggaattcctatacatgctagaaaacaaggaaagggcaggtgcttatgacgattgaacatacgacttatttaggagtttcagccataaaggcggagactgatcaggctgaatgcatcattgtgccggagtggggatcaaatgtcatatcgcttcgggataaaagaaccggtatgcggcttctgagagaaccggaaactgcggaggaattcctcaaaaaaccgatgctgtacggcattcccgttttattcccgccgaaccggattacggacgggacgtttcgttttgacggccgctcgtatcaattcgagataaacgaagaggataaacataatcatattcacggctttcttcacaatcagcattggaaagcggcagcagcgaaagaagagggggatggaatgacagtcgaaacagaaattgatctttcaaagattccccgtgttcataaacaatttccgcacgatgtcattgtccggatgacctatacattaaaagacaatgtgtttacgcagcgggcgctgattatgaataagggaacggaggcttttccttgggggctaggctatcattccacatttgttttcaatgaagagcaatcccgtctatttttgacggctgaccgcatgtgggaattaaatgaacgtttcgtaccgacgggccgtttattggatgttcctgataaagaagcgttccgtcatgggatgtctttgaaaaataaacagtttgacgatgtttttctttcttccggacggaatggcggcaataacgaagctgttatttatcatccgaatgagaaattatccgttttgtatcaggcagacacgtctttcaagcattgggtggtatataacggtgacggaaagcaggggtttgtcagtcttgagccttatacttccgttacagatgcatttaatctgaatcagcctgcatcactgacagggcttcagattctgaaaccgggcgaagaagcggctgcgtcatccgggatcaccattttgcatgacgaagaataggaaagaggcgggataacattgaaaacatatgtgaaacgcttgtgcgcggtgattctgcttttgatcattgccgaagttccttatattgatgatgcggctaaggcggctgaacaaaaaaatactttgcaaaaagagctggaacacattctggatgaagaacccgctttaaagggggcttcagcgggcatcattgtccggtcagcaaaaacaggggaggtgctgttcggcagccgggaagatatgcggctgaggcctgcatcattgatgaaactgctgacggcatctgcggcgctttccgttctcggagaagattacacctttaagacagaagtacgggcagacggcgccgtgaaaggaaaacagctgcgcggaaacctttatctcaggggaaaaggcgatccgaccctattggcttctgattttgagaagatggctaaacaggtcaaagccagaggcatccatgtcattaaaggagatctggtcggggatgattcgtggtatgacgataccaggtattcagttgatcttccgtggagtgatgaaggccaatattatggcgcgcaagtatcagctcttaccgcttccccaaatgaggattatgataccggaacggtgattgcggaaatcagcccggcgaaacagcccgataaaaagccgcgcatttcaatttctccctatacggacatcgttcgtgtgaaaaatgaagtaaaaaccgtcgcttctgatgaaaagaaagaattgacggttgaacgggagcacggtggcaatgtgattacgataaagggagccatacctgccggctcggcaaaggcaagagaatgggcggcagtgtgggatccgtcgtcctatgctttagatttatggaaacaagcgcttactaaacagggtgtaactgtaaaagggaaaatcagaacaggccgaatgccgcaccgcacccagcttgtcacatcacggacatccatgcctctttcagaattattgatcccgtttatgaaactgagcaacaacgggcacgccgaaattctgatcaaggaaatgggaaaagtgaaaaaaggggagggcagctgggaaaagggcttggacgtgatgaaatcggagctcaaatcgttcgggctcaatccggatgaattgattgcaagagacggatccggcgtttctcatattaacggcgtatccgccggccaaatcggagagcttttgtatgcggttcagaaagagaagtggtacccggctttccttcgttcgctccctgtcgccggtgcaagcgacagaatgacgggaggcactcttcggaaccggctgaagaatactccggcagagggcaaaattaaagcaaaaaccgggtcactaacatcagtcagttcgattgccggctatgcagacacaaaaacaggagatacgcttattttttccgtgcttcaaaacgggctgcttgacgaagatgacggaaaagacattgaagacaaaatcgcagtcgtgctggcaaatcaataagaagggccggatccttagagggttcggcttttttgatgtctgtaaaacattatattgcgattatgaatcaatcttttcaaaaagtaatatcggcaacattcttccttttttttacatgatactttcttacttgttcactgatttttcattttttatcataaaatttcttttcggaaagcaaaacctttttaaaagcgcaattaattatacattttattccttattatagtgttttagaaccagtttgcagtgtacatacatactgttttacatggtataaaaattatagaaatgaagaagtgaagtgaggaatatatactatattctaaaaaatgttagaaaaaatttaattttttattgtgatttctaaaatatgttttaaaataatgcttatatggatgatttagtcatatgctgtcgaaatttaattgtaattatttcactttcttatcctcttaaattgaaatggagggattccattgaagaacactgtttattctttaactcacgcccaaagaagagtctggtttacagagctgctcgagccgggcacaagtatctgcaatcttgcggcgtgcgtcaaattcagggggaatatcgactttgacgtattgcgccgtgctttagatttctctatcttgcaaaatgattcgctcaggtttcaactgacggaaggggacggctcagaaccccagctgtatctggccgggcatcggccgatttctttagagaccgttgattttactcatattgatcaatcagagcgggatgcatggattgacaaacagacgcgtgttccgttcaagctgtttcattcaccgctgtatcattttactctgcttgtcatgtcagacgaagaagtttggctttattcaaaatttcaccatattattatggacggcatctcgctcaatctgcttggcaatcagctcattgaaatctaccaaaaaatcatgcgaagcgaggatttggccgaacaccaaagcccttcctatctcagctacatggaaaaagaacagcaatacctacagtcttcccgttttcaaaaagaccgttcattttggactgaaacataccgaaccgttccggaacacctttcactggcggaacgaacctctcatcttagacaaagcactgcagcttcaagagatacaatcactctttcccactccttagaacaatcaatccggcgtttttgcaaagatcataatgtcagcatcatctctctgtttatggcttcgttatacatatgcatcagccgtctgacggctaaaaaggatattgccatcggtacttattacggaaaccgcggttccaagctcgaaaaggatatgctcggcatgttcgtcagcacgctaccgatcagaatgacggcagatccggatgcggagttcgtgtcttttgtccgcagtgtaggaaaacagcagctgtctgttatgcggcaccagaaatatccttacaatctttttgtcaatgaattaaggcagattcatcacgacctgcaaaatatcatcgggatttcgatgcaataccagcctctcgcgtggcgtcaggcagaaggtttcgattatgaaacggcgatgtttttcagcgggcatacggcaaatgagctgtccattttaattaaggagcggacagatacgggattgattgagctgaattttgattatcaatccgctttatttactaaaacatcgattaaacgaattcaaactcatttgctgacgatcgttgaaaatgccgttagaaatccaaaccggctgattcggcatattgatatggcggatgaaaaagaaaagaaacgggtgttaactgcgtttaaccatacagaaacggctgaaccgccggccccgacgcttcacgggctgtttgcccgccgcgccgcgctttcgccgcatcgtccggcgctccgttttccgggcggtatgctgacgtacgctgagcttgaccagtacacagacaggctcgccgttcggctccgccaaaaaggcatccgcaaagaaagcatggtcggcgtactcgctgaacgctcgccggagatggcggtttcagtgcttgccgtgttaaaagcgggcggcgcctacgtgccgcttgacccggagtatcctgaggacaggctgcgatatatgcttgaggacagcggcgcttgtctcctgcttgcacagccggggttatccgtttccggtttttccggtgaaacgctagaagtgtctctttcttctctgacaaatgagacggagacaggggctgtctctgaagaagcggatgctgattcgctcgcttatatcatttatacgtccggttcgacgggaacaccgaagggagtggctgttgaacaccgtcaagccgccgcctttttatcagggatgcaagggcagtttccgttaacggaagaggatattatcgtgctgaaatcatccttttcattcgacgcctccatctggcaattgttttggtggacgatgtccggcgcctccgtgtatctgcttccggccggctgggagaaagatcctgtgcggatgattgaagcgtttgcctcagaaaaggtgacgaccgcgcattttattccggcgatggtcaacagctttttagacgcgctggaaacagagcctgcggaaacaagaacacgcctcggcagaacactgacacgcgtgttcgccggaggggaagctctttccccgcttacggctgcccggtttgccgatcttctgccggagaccatgcttattcacggctatggaccgacggaagcgacggttgatgcggcgttttacgtctgtgaccgaaaacgggacagcggacggacaaggcttccgatcggaaaacccgttccgggtgcccgtctgtatgtattagatagcggaggaaccatccagcctgcgggcgtggcaggagagctgtacatcgcggggaccggcgtggcccggggctatctgaaccgccctgagctgacggaggagcgctttgtcgttgatccgttttatccgggagaacgcatgtatcagacgggcgatatcgcacgctggacagaagacggccttgtcgaatggctcggtcgttcagacggacaggtgaaagtccgcggctaccggattgaaccgggggaaatcgaagcggcgatccggcacatcgacggcattcgtgaggcggcggtcaccgcccggaccgaacacggcgaaaccgcgctttacgcctatattgaaggacgaaaaagcgatgacgtgcgggcggagcttgcgacacgccttccggcctacatgatgccggctcagtttatagagatgagcgaatggccggtcacgccaagcggaaagcttgaccgccgcgcgctgccggctcccggcggatcggcagacagacaggcgtacactgccccgcggaacgtcacggaaatgaagctttgcgccctttgggaagaggtgctgaaaaacggccccgtcggcatccgggatcacttttttgagcggggcggccattcgttaaaagcgacggctctcgtctcccgcatcgccaaagagttcggtgttcaggtgccgttacaggacatcttcgcccggccgacggtggaagagctcgcttcggttattcaggacttggaagaaagctcgtatgaagcgattcagcctgcgcaaacacaagatacctacccggtgtcttcagcgcagaaacggatgtatgtgctccaacagcttgaagacggcggtgtcggctacaatatgccggctgtgctggaactgacgggcccgcttgaccgtgtccggctggaggagacgttccggcagcttgtggagcggcacgagtcgctcagaacgtcctttgaaacggggcctgacggcgaaccggtgcagcgcatccatgacagcgtgccgtttcagctcgatgaggccgagtcagctgacgcattcgtccggccgttttgtctggaggaagcgccgctcttccgtgcggccctcgtgaaagaatcggaagaacaccatcttttattaacggatatgcatcatattatttctgacggtgtgtccgtcaacaccttgataaaagaattcggcgagctgtacgcaggccgttcgcttgcgccgatgcgccttcaatataaagactatgccgtctggcagcggtcgtttcaggagaaagaaggatatcagaagcaggaagcctattggctgaagcggcttgaaggagagcttccggtgcttgaacttccggctgacaagccccgtccggcggtcagaagctttgcgggcggcagcgtatcgtgcacgcttgacgctgacacggcatccggccttcaccgcatcgcccgggatcacggctccactttgtatatggtgcttctcgccgcgtacaatacgctgctcgcgcgattgagcgggcaggaagacatcatcgtcggatcgccgattgccgggcgcccgcacaaagaccttgaaccgattctcgggatgttcgtcaacacgcttgccatcagaacggagccgaagggggacaaacggttcaccgattatttggcggaagtccgccaggcggcgcttgaggcgtatgaacatcaggactacccgtttgaagagcttgtggagcggctcggcgtgcagcgggacatgagccgcaatccgctgtttgatgtgatgtttattcttcagaatatggagcgggaggagataaatctggccggtctgaaggcgtcacgatcaaagcataccgaacatgatgtatcaagttttgacctgaccttatcagcggctgaatccgatggaaacatccgctttgagatggaattcagcaccgagctttttatgaaagaaacgattgaacgctggatgggccacttactgaatctcttgcgccatgttgccgccgaaccggaagtcacactatcgaaagctgacattttggatgaagaagaaaaacaaaagttactgattgagtttaataacacacaaaccgaattcatggaaaaacacaaactgtttcaccagctgtttgaagagaaagcagaagaaacgcctcatcagaccgctgttattgaaggagcacaacagatcagctatttccagctcaatgagcgggcaaaccgtcttgcccgaacactgcagaaaaatggattcggtccgggaaaaagagcagccatattagcaaaccgttcgattgaagcgatcgtcagtgttcttgcggtcatgaaatcaggaggagcgtatataccggttgactcccattatcctgaggaacggattcgctatttattaaaagacagcgcggcatccgtcttgatggtgcagtcagaatacaaagaacttgcttcacagctgacggatcacaatttatttctcattcagcttgatcatgaagatcaatacgatatttccgcaaagaatattcagccgacagcgtcaccggatgataccgcatatatcatatatacttcgggaacaacgggaacgccgaagggagtcgaagtcagaaatcgcagctttacgcatgcagcacttgcatggcgcaggatttatgagcttgatcttataccggtcagagtgctgcagatggcgagtttctcatttgatgtattttcaggggatctagcacgcgccctgctaaacgggggaacgcttgtcatttgtccggatgacgtccggcttgagccgcagcagctttatcggctcattgatcagcaccgtatcacgtttatggagtcgacacccgcgctgattgttccgtttatggaatatatataccgccggaaactcgcgctgcaaagcgtaaaaatactggtacttggttcagatatgatcaagtcgcaagatttttatacgcttcatgaacgctttgggaaagaaatgcggatcattaacagctacggtgtaacagaagcgacaattgactcttcgtattatgaagccgaaatgagcgaagagccgcgggaagatgatgtgccgatcggtgttccgcttccgaatgtgcaaatgtacgtcttaaacaaagacaaacaggtccagccgatcggcgttttcggagagctgtatatcggaggcgccggcgtcgccaaaggatattggggacagcctgagctgacagaggacgcattcagtgacccgttacaaacgggagaaacgctttacagaaccggagatcaggcttgctggctgccggatggaactcttcgttttaaagggcggatcgataagcaggtgaagatcagaggctacagaattgagacgggagaaatagaaagtgtgcttttgaaacacgatcaagtcaaagaagcggctgttaccgtgatgaaagatgccgaaggacaagcacgattagcggcatacgtcgttcctaaagaggccgatatctcatcactccgccagtctcttatgcaggagctcccggcttatatgatgccgtctcatattatcggtttagacagcatgccccttacactgaacggcaaacttgataaatcggcattgccggcagaagagatacattcatcacaggcatttgtcgcgcccggcgatgaaaaacaggcgatgttatgccggatttgggaagatgtgcttcatattcagaaagcgggaattcatcactctttctttgagcttgggggagattccattaaggcgcttcaagtgtcagcccgactcgccggagaaggctggaacatgtcgatccgcgatttgtttcagttcccgacgattgcagaactcgcgaagcacctcacgccggctgttgcaacggctgatcagggcccgatagaaggaagcgctccgctgacaccgatccagcagagattttttgaggagccgggtgcgtttgagcttcattataaccaatcagtcatgctgtgcagtgaagacagcctcgaaatagatgcgctgtatcaggcggtttgcgcgctgacagaacatcatgatgcgctgcgaatgactttcactgaaaatgagcatggggaagttgttcaatataaccgcggaatcacagagcagcatgaagaaatctttacgcttaacgtcatagatctttcagaagaaacacagccggaaaaacggatagccgctgaggaaaaagaaatacagcaggctatgcgccttgatcaaggccctctgcttcatctcggagtgttcaggctgaaagaagccgaccatctgctcatcacgattcatcaccttatcacggacggcgtgtcgtggagaatattgcttgaagatctgcagacagcatatcagcaggcattggacggcaaacaaatcgaactgccgccgaaaagcgattcttatataaagtatgccgaagagctttttgacatttccaagagcaaagcattgctggaggaagccgcatactgggacagcgtgatgtctggtgaaacagcgccgctgccgaaaataactgatgaaaacgccggacgattgcaggaaaacgcgcgcactgcatcatggatattaagcagcgaagtcacgaagcagctgctgatggaaacacagcaggcgtacggaacggatgttcatgaattgcttttaacggcgcttggaatgacgcttcatgagtggacgggttccgaacagatccttatcagcactgaaggacacggacgccaggggcatattcctgacattgatatgtcaagaacggcgggctggtttacatctgtttacccggtgcttttggatatgagagtgccggacggctcaggggaaacaaccgcgcaccgcataaagacggtaaaagacatgatgagacgggttcctcatcacggaaccggctacgggctgctgagatattcgcgaaacattctttataaagacccagaaataagctttaactatctcggtgcgtttgacggtcttgaggggacgctgaagatgtcaccgttcaagccgcagcatgatatagcggccgggcgcatccgcgagtttgatctggatattaacgcgatggtggcggccgggcaactggaggtaaaagccgtttataccgatgtatttgcaccgggggcaatcgagttcttcatgaatcgtttccatactcacctcggggacatcatcgcccactgttccggcaagaaagagcgggaaaaaacattaacggattacagccatacagaattgaccgctcaagccctatcaagcattgaagatctcgtaaaaggactttaatttcataaaaaggtgtgtggcattcgtgacacaagcgacagaaattcaagatatttaccctttatcatatatgcaggaaggcatgctgtttcattcgcttctggattccggatcaaacgcatatgttgagcagatttcgtttacagtcagcggggatttatgcattgatacattccaaaaaagtctggatatgcttgtcagccgttatgatattttcagaacgattttcataaaagaagtgcctgaccttgaagggccgcagcaggttgtcctttcacgccgtgacactgccgtacggactgaagacatttcagattattcggaagaacggcagcaaagcatcattgacaaattcaaggaaaccgaccggcataaggggtttgatctgcaaaaaggccccttaatgcgcctgactctttttcaaacgggagaaaaccgccatacgtgcgtttggactcatcatcacattatgatggacggctggagcttgggccttgtactgaaagatttcttcagcatgtattatgcgatccggagcgggcggcctgtaaacctcggcagtccggctccttacagcacttatatcaaatggctccgaagccggaataaagaagaaacgtcagcattctggtcgcgctgcttggaagattacggagaaaccgtttccgttccgcaaacgaagaataagacggcgcaaaacggttatgcatctgagcatttccaattttcccttgagcctgaaaccgtacaaaaactgacagacattgcccgaggcatcggggtcacgctgaatactatatttacgggcatttggggtctgcttctccatcgttacaacgggactgaagatgccgtcttcggttcggttgtttccggcaggccttcagctatcagcggcattgaatccatggccggactgtttatcaataccgtgccggtaagggtgcgcgcggctggtgatatgactttttcttctcttctcaaaaaggtgcaaaaagagtcactcgctgcggaagagcacagctattatccgctttatgacattcaaaacgagagcggcctgcaaaaagatctcttgaatcacatcctggtttttgaaaattatccggttcagatgcaggctgcggtaaacggctggcagcaaacggaaagccatgcgctctcacttgaaaacttttcgatggcggaggaaaccaattacgatcttaacgtcgtcatcgttccgggagaagagttttatgtgaaattcagctacaatgcgggcatctacgatcgggaagacatgaaacggatcaaagggcatattctagaggtcatctcctgtgtaacggaagatccggacaggcttttatcaagcatcagtctcgtaccaccggaggaagaagccctgattcattcgtttaacgaaacgaaccgtccgtaccctgagacaaccgttcatgggctgtttgaagaacaggcggcaaaaacgcctgaccaagaggcgttgagatataacggggtaagctggagctacaagaaattaaatcagcgggcaaatcagattgcccatgcgttaagggaaaaaggcgcccgttcagatcagatcaccgctgttatgctgcgccgatcaatgagtacggttgccgctctgctcggaatttggaagtcgggcagcgcctatatgccgattgatgcggaatttccgcctgaacggatttcatttttactgagagacagtgaagcctcactgctcctgactgaaaaagacctgctccccctcattccgccgcatttcaaggggagcgtcgtcatcatggaggaaacggtttcccagcagactgcaccgcttccgccggtgtctgacagcggaaattgggcgtatgtcatttacacttccggaacgacaggccggccgaaaggggtgcttgtacaacacaaagcgatcagcaatacattgcaatggcggcgtgaagaatacgggatgacagaaggagacatagcgcttcatcttttttcatacgtatttgacgggtcattaacgagtcttttcactccgcttctgtcgggcgcctgtgtactgttaactgatgaagatgatgcgaaagacgtcctttcaataaaacagaaaatcgcccgccacggggtaagccatcttctgatcgttccgtctctgtatcgcgttctgcttgattcgctgacgaaaaaggatgcgcagacgcttcgggcggtgacatttgccggggaagcggccactcctgatatcgtggaagcgagccgcaacatatgcccgaatgccgagctgctgaatgaatacggcccgacggaaaacagtgtggccacgacgattctgcgcaacctgcaaaaaagcagccggattacgatcgggcgcccgattgccaacacttctgtctatatgatgcacggagatcggctgcaaccggtcggagccgtcggtgaactgtgtatttccggaaaaggtctggcggacggatattttcagcaaaaagagctgacggacaaagtctttacccctcatccgtttcgtaaaggtgaacggctgtacagaacgggagatgcagcccgatttttaccggacggaacgattgaatatatgggacgctttgacgatcaggtgaaggtaagaggttacagaattgaattaggagaaatcgaaacggcactcagaagtctgtccggggtaaaagaggcggcagtcatcgtgcgcaaaacggcggacggggaacaggagcttgcagcttatgccgtactggaaaacgcgggtgtgacatttgatcctcatgccgaattggccgggagattacctgcttatatgatcccgggaagctttaccaaattgacggaaatgccgctgtctgtgagcggaaaacttgaccgggccgcacttcctgagccgaaagaagccgagagaaccggtgattatcaagctccgcgcacaatgcttgagactgagctgctgtctatttggcaagaagtgctgaaacgggaacacatcagtatgagagatgatttcttccaaatcggcggacagtcgctgaaagccgcgtcgcttgtttcaaagatacataaacggctgcaaattgaacttgccgtccgccatgtttttgaacatccgaccatcgagagcatggcccgcttcctagaacagaggaaaagaggagaatatgcagaaatcacgcctgcggaggcaaaggacttgtacccgctatcttttgcgcaaaaaaggctttatgcccttcatcagcttgcggcggacagtacgggctatcatatgcccgcttgtctggaactgagcggcagactcaaccgtgatcgtctgcacgaagccttttcagcgctgttacaaaggcatgaagcgttacggacatcatttgttttacgaaacggggagccgatgcagcacgtacattcacatgtcgatctcgatctcacagagattcacatgccatccgggacacttcttcaagaggcgatggaaactttcgtcaaaccgtttgacgtggaaaaagcgccgcttttgagagtgactttagccaaagccactgaagaacgtcattttctgctgcttgatatgcatcatcttattgcagacggtgtgtcaatgagcgttctgatccaagaattgacggatttgtacagaggaaaagagctgcggccgttaaaacttcagtacaaagatttttccgtctggcagcatgagcggttcgccgctgaagaattcaaaagacatgagcggtattggctggatgcgatcggggaaaatattccccttcttgatctgccgctcgataaaaagcgcccgcagcttcctgatttcagcgggtccgttgttcgaacgcgcctacaaaaagaaacggcggagaatttgcgccggctcatggatgagacgggttcgacactgtatatgattcttttggcaggctactccttgttcctttctaaattgagcgggcaggaggacattgtcgtcggttcacctgcggccggcagaagccgcgctgagcttgatggggtcatcggcatgtttgtaaataccgtggcaatgagaagcaggccgaaaggggataaaacattccgcgcttatttagaagaggtgaaaatgctcgccctcggcgcagccgaacatcaggacttcccgtttgaagaacttgcccaaaagcttgatacacaccgggaagtcaatcgcaatccgctgtttgatgccatgctcgttttgcaaaacagtgatgatttcaaagtgaaccttccgggcttatccgtttcttcacatgcagtgaaacatgacatttcaaaattcgacttgacgcttcatgccgaggaacggccggacggctcactggattttcattttgaatacagtaccgcgttgtttgaaaaaggtacgatcgaacggtgggccggtcattttaaagagcttttaggacaaatcgcatcggatgatgagcggaagctgtctgacattcatttgctggacacaaatgagcggcagatgcttcttcaagcggaaaatcaaacagctgagtatccgaggcatgagacgatcgtcagtttatttgaggcacaggcggaaaaaatgccggatcaaattgcagccgttatgtccgatgagcgtctcacctaccgcgagctcaatgaaaaggcggatcgaatcgccgatatgctgtcggaaaacggcatccgctccggacagattgtcggaattatgaccgaacgatctcctgaaatgctgatcgggattttcggtattttaaaagcgggaggagcttatctgccgattgatcctgactatcctgacgagcggatttcatttatgctgactgacagcggcgcgcgtgttctgttgacgcaatcgggtcttgggatatccggaatggacgggctgccggttttatacatcgataagcctgaatccgtttcagcagacagaacgaaagaaatgataacgcctgaacagccggcttacgtgatttacacatcgggcacaaccggaaaaccgaaaggcgttatgacggagcaccgcaatgtcatcagccttatcacacataaaggactgccgtttgatttcggcactggagacgtctggaccctgttccactcctattgctttgatttttctgtctgggaaatattcggcgcgctcttatacggcggaaaggtagttatcgtgccgaaagaaactgcccgtgatccgcatttgtaccggcagctgctgcaaagtgaaggcgtaacggtgctgaaccaaacgccgacggctttttccggactcattcatgaagaagccgggcatgcggacaagctgaagcttcgatatgtcattttcggcggagaagcgctccagcccggcatgctgaaaagctggaaagagaagtacccggagacagagcttgttaatatgtacggcattacggaaaccacggttcacgtcacatgcaaaaaactgaatatggatgatattgagagaaataaaagcaatatcggcagaccgctggaaaccctccatgcttttgtcatggacgcctatatgaatccgcagccgatcggaattccaggtgagctttatatcggcggggaaggcgtcgcgaggggatatgtaaacagggatgatttaaccgcctcccggttcatcacgaatccgcacattaccggcatgcggctctaccggacgggcgatattgccaaaagactctcaaatggcgagctggaatatgtcgggcggaaagatgcgcaagtaaaagtcagaggccacagaattgagctgggagaaataaaatcagcgctgcaggagctttccttcgtgaaagaggccgccgtgatcacacgtgctgatcagcacggtcagcactccatttacgcatacgcggtcttacacgggaatgaaaaaataaaagaagcagaggttcaggcctctctcagagcttttctgccggaatatatgattcccgcccgcttgatagagcttgatgaactgcctttgacggcgaatgggaagctggacgagaaggcgctcccgcagcctgaattaaatgaaagccttggagatgatatcagcctgagaaatgaaactgaagaaatgatggctgacatctgggaagaactcttaggtgttgaaggactcggccccaatgctcatttcttccatctcggcggggattcgattaaagcgctgcaagtatgtgcgaggctgaaacagcagggctatgaaacgaccgtccgcgagctgttcgagcatcagacactgggagaagtctcgatgcggctccggaaagtccgccgcgtgattgatcaggctcccgtcacgggagacgtgccgctgacgccgatccagcactggttcttttcgcaatcattgccgcatgatcattttaatcagtccgttatgctcagcagtgcggacaggatcaatgaatctgctatgagaaaagcgctggcacagctcgcggttcatcatgacgcattacggatggtatgcggcacgcaaaacggatcagtgattcaatataacagagcggataacctttctgaagaagaactctttacatttgaaacgcatgacgtgagagggaaagggttattacaagaggaacacgccgcaattgaacaggcggccgcccgcattcaaacttccattcggctggagacgggtccgctcgtagctgtcggtttatttcacgctaatgatggcgatcatctgctgctttccattcatcaccttgtcattgacggagtgtcatggcggattttatttgaagatctcaccgcgtgctacaggcaggcgctcgaaggaaaagaagccgcgcttccggcaaaaaccgattcctatcagacttacgcgaagcaaatctctgattatgcaaaaagccgccggctgttacaggaagcagactactggtccgaaagagaaaaagcggcggtcaaaccgcttccgaaagatgcccgcatctcttccaatcttctgaaagatacagatgtgatgaccgttacattgacaaaacaggagaccgagcagctgttaacggaagcgaacagagcatacacaacagagacgggcgaattattgcttgccgcgttaagcctagcgctgaacagatggaccggaaacgagacattcaaaatcagcatggaaggccacggaagggaagagcacctggagcatcttgatatcagcagaaccatcggctggtttacgtcaatttatccggtattggttgacgcaagttttcaagatcagcctgatgacggcgagcgtctcggctatcacattaagcggacaaaagacatgatgcgccgcataccgcataaaggagcgggatacggggtgctgaaatatataagcaaactctggggagagactgaatctgattctcctgaaatcagttttaactatctgggacagtttgaccgggaaatccgttccagcggcttcggtgtttctcccgtaaaagcgggaaatgaagtcagcccagactgggaacgtccgtacacacttgatatcagcggctccgtatcgtcggaatgtctcagcatgcatgtcgtgtacaaccgttttcagtatcaaaaagaaacgattgaagttttgacgggatattttcatacctttctcaagcagattatcacgcattgcacaggcaaagaggagcgtgaatggagcgccgctgatttcagtgacgaggagttaacgctggaagatctgagtgacattatgggagccgtcaacaaactatagaaaaggagtggcgcaatggggcagcaaccggaaatacaagatatatatcctttgtcttttatgcaggagggcatgctttttcattctctgttggatcatgactcaagagcctacttcgaacaagcggtgtttacgatcagcggacagcttgaccgggaacggttccaaaaaagtatagacactgtttttgaacgatacgatattttccgtacgacatttattcacaagaatgtggcaaagccccgccaagtcgtgttgaaaaacaggccgagccgcgttcagtttcatgatatttctcatttggacgagaaggcacaagacaaatatgccgaccggtttagaaaagaagataaagataaaggctttgatttgcaatcagaccctctcatgagagtctccattttgaaaaaagcgcctgaacgctatgtttgtatatggagccatcatcatattgtcatggatggctggtgcttcggaattgtcatgaaggaatttctgatgatctatcaatctctcggagacgaacggcttccgttcctcgagcccgttcagccatatgggaagtatattaaatggctcatgaagcaggatcgtaaagaagccgagattttttggaaaacgagacttgccgatcttgagcaaacggcgtctcttccgaaaaaatccgcggaaccaaacggcgaacttgagcaggcggttttcaccatttctgaagagcagacaaatgagctgaagaacattgcggcaagggcgggagcaacgctgaatacagtgttccaggcactgtggggcattttgctgcagcgtgtcagccgctgtgatgatgccgttttcggttctgtcgtttccggccggccgtcggatctcgcaggcgtggaaaaaatggtgggactgtttatcaatacgattcccgtacgggtgaaaagcggttcattttcttttctggagcttgtcaggcatttgcagcaggagacgctgcaagcagaagcgtacagctattatccgctgtatgacattcaggcgcaaagccctctgaagcaagcgctgtttgaccacattatcgtgtttgaaaatgtgccggcccagcgtgaaattgaaaatgtgagtcaggccggttcatttgattttgcggtagaggattttacgatggaagaagtcacaaactacggatgcagcataaaggtgattccgggcaattctctttatatccgcttaaaatttgataccggtatatacgacgatgtttttatgaagaatatcgaaacatttttacggcatatggtgaactcagtcatttccgaccctgaaatcggcgcttccgagatcgcattgctggatgcgtgtgaagccagaagtatgatggatgcatttaaccatacagaagcggttgaaccgccggctccgacgcttcacgggctgtttgcccgccgcgccgcgctttcgccgcatcgtccggcgctccgttttccgggcggtatgctgacgtacgctgagcttgaccagtacacggacaggctcgccgtccggctccgacaaaaaggcgtccgcaaagaaagcatggtcggcgtactcgctgaacgctcgccggagatggcggtttcagtgcttgccgtgttaaaagcgggcggcgcctacgtgccgcttgacccggagtatcctgaggacaggctgcgatatatgcttgaggacagcggcgcttgtctcctgcttgcacagccggggttatccgtttccggtttttccggtgaaacgctagaagtgtctctttcttctctgacaaatgagacggagacaggggctgtctctgaagaagcggatgctgattcgctcgcttatatcatttatacgtccggttcgacgggaacaccgaagggagtggctgttgaacaccgtcaagccgccgcctttttatcagggatgcaagggcagtttccgttaacggaagaggatattatcgtgctgaaatcatccttttcattcgacgcctccatctggcaattgttttggtggacgatgtccggcgcctccgtgtatctgcttccggccggctgggagaaagatcctgtgcggatgattgaagcgtttgcctcagaaaaggtgacgaccgcgcattttattccggcgatggtcaacagctttttagacgcgctggaaacagagcctgcggaaacaagaacacgcctcggcagaacactgacacgcgtgttcgccggaggggaagctctttccccgcttacggctgcccggtttgccgatcttctgccggagaccatgcttattcacggctatggaccgacggaagcgacggttgatgcggcgttttacgtctgtgaccgaaaacgggacagcggacggacaaggcttccgatcggaaaacccgttccgggtgcccgtctgtatgtattagatagcggaggaaccatccagcctgcgggcgtggcaggagagctgtacatcgcggggaccggcgtggcccggggctatctgaaccgccctgagctgacggaggagcgctttgtcgttgatccgttttatccgggagaacgcatgtatcagacgggcgatatcgcacgctggacagaagacggccttgtcgaatggctcggtcgttcagacggacaggtgaaagtccgcggctaccggattgaaccgggggaaatcgaagcggcgatccggcacatcgacggcattcgtgaggcggcggtcaccgcccggaccgaacacggcgaaaccgcgctttacgcctatattgaaggacgaaaaagcgatgacgtgcgggcggagcttgcgacacgccttccggcctacatgatgccggctcagtttatagagatgagcgaatggccggtcacgccaagcggaaagcttgaccgccgcgcgctgccggctcccggcggatcggcagacagacaggcgtacactgccccgcggaacgtcacggaaatgaagctttgcgccctttgggaagaggtgctgaaaaacggccccgtcggcatccgggatcacttttttgagcggggcggccattcgttaaaagcgacggctctcgtctcccgcatcgccaaagagttcggtgttcaggtgccgttacaggacatcttcgcccggccgacggtggaagagctcgcttcggttattcaggacttggaagaaagctcgtatgaagcgattcagcctgcgcaaacacaagatacctacccggtgtcttcagcgcagaaacggatgtatgtgctccaacagcttgaagacggcggtgtcggctacaatatgccggctgtgctggaactgacgggcccgcttgaccgtgtccggctggaggagacgttccggcagcttgtggagcggcacgagtcgctcagaacgtcctttgaaacggggcctgacggcgaaccggtgcagcgcatccatgacagcgtgccgtttcagctcgatgaggccgagtcagctgacgcattcgtccggccgttttgtctggaggaagcgccgctcttccgtgcggccctcgtgaaagaatcggaagaacaccatcttttattaacggatatgcatcatattatttctgacggtgtgtccgtcaacaccttgataaaagaattcggcgagctgtacgcaggccgttcgcttgcgccgatgcgccttcaatataaagactatgccgtctggcagcggtcgtttcaggagaaagaaggatatcagaagcaggaagcctattggctgaagcggcttgaaggagagcttccggtgcttgaacttccggctgacaagccccgtccggcggtcagaagctttgcgggcggcagcgtatcgtgcacgcttgacgctgacacggcatccggccttcaccgcatcgcccgggatcacggctccactttgtatatggtgcttctcgccgcgtacaatacgctgctcgcgcgattgagcgggcaggaagacatcatcgtcggatcgccgattgccgggcgcccgcacaaagaccttgaaccgattctcggggtgttcgtcaacacgctggccatcagaacggagccgaaaggagacaaacggcttaccgattatttggcggaagtccgccaggcggcgcttgaggcgtatgaacatcaggactacccgtttgaagagcttgtggagcggctcggcgtgcagcgggacatgagccgtaatccgctgtttgacgtgatgtttgtgctccaaaatatggagcgtgaatccctgaatttaaatgagctgcatttgactcaagccgcggatgcaggtcataaaaccgcaaagtttgatgccacgctttacgcggcagaagggtctgacggttccatcagctttgattttgaattcaatacagatatctatcaaaaacagacaatcgaaaaatggctttcttattttacccgtattcttacaaaagtaattgaagaccaaacaataccgcttggtgacattcacgtactggatgatgctgaaacaaatcgcgttatttatcagtttaatcagacgaaaagcgattacccaagacacgaaaccatcagccgtttatttgagcggcaggctgaagaaacccccgatgcccgggcagttgtatatgatggacaaatcttgacataccgtgagctgaacgaacgggctaatagaatagcggcggctctccgatcaaatggcgtcggtccggaaagtgttgtcgccttattaaccggacgtacaacagagcttgcttccggaatcctcggaatattaaaagcgggaggcgcctacttgcctatcggtgacgatgtgcctcgggaacgggctgaatggatgcttaaagactgtaaagctgatattcttctccaatctgataaacttgacggtctgccgctttccggaaaacgtttattcatagaggatattcaaacaaaggccggcttaagttcggaaaatcccgaaccgctcggcggacctgaatcattggcctacatgatttatacatccgggtcaacaggtgcgccaaaaggcgtcatgattgaacagcgaagtgtgatccgtcttgtgaaaaacagcaattatattgattttacgccgaaagacagactgttgtttacttcatcattaggatttgatgtaacgacatttgaaatattcggtccgcttttaaacggtgcttctttatatgtaagtgaccaggaaacctatctcgactctgatgttctggaaacatttatacagcaaaacggcattacgacactgtggctgacatcgtctttgttcaatcatctatcagaacaaaatgaacacgtgttttccggattatcccgattgattatcggcggggaagcactgtccccaagtcatgtaaaccgggttcggaaaacgctgccgcatctttcaatatggaatggatacggaccgactgaaaacacgacgttctcgacttgctttttgattgaacaatcatacgatcattcaatcccgatcggccgccctgtcggaaattcaactgcatatatcataaacagcaggggaacaccgcagccgatcggcgtcatcggtgaattatgcacaggcggagacggtgtggcaagaggatatttcggccgccctgagctgacggaagaaaaatttgtccctaatccttttgttcccggagaacggatgtaccgcaccggggatttagcccgctggctgccggacggaacgattgaatatgccggacggatggatgatcaagtgaaaatccgcggttatcgggtcgagctgggagagattgaagccgcactaaggagcctggacggcgtgaaagaagctgccgtgtcagtcagaaccgggcagtccggcaataaagaactgatcgcatatatgagtctgcaggcggacatggatacagaaaaagtgcgttcttcactttctaagcaactgccgaattacatggtcccggcctatatgatggaacttgagaagctgccgcttacgccgaacggtaaattggatcggaaaaatctgcccgaaccggagctcgcgcttcaaaccgcgtacacagctccccgcaatgagcttgaagaacagctttccgtgatctggcaggaagtgctcggcacaaaacaagtcgggattgaggattcattttttgagttgggcggcgattcaatcaaagcgctccaagttgccgcacggctcggacgctatgggtggaaaatgacggcaagtgacttattccggcatccgtccattaaggaactcgcgcctcttatccggaaagcggaaagagtcatcgatcagcaaccggtggaaggagacataccttggacacccgttcagcactggtttttatcacagcggatggaaaacagaaatcatttcaatcagtccgtcatgatgttcagctctgacgcattgcataaacagccgctcaaacaagccttggagcatcttgtcattcatcatgatgcactccggatcaccgtcagtgcagaaaacgaaagtatcagacaaatcaatcacggtattcaaaaagatgaactgtacagcttggacatttgggatctgtctgagacagatacttgggaaagagaaatagaagatgaagtggctgcgctccaacagcggatggatattgaaaaaggaccgttattaaaagccggctggttcaaaacccggtcaggggattatttattcatcaccgtacatcacctggcggttgacggagtgtcatggcgtattctgctggaggatttatctgccgcttacacacaagccgtaaaaggtcagccggtccagcttccgccaaagaccgattcgtttaagcaatacgccgtaaggctttcagaatacgcaaaaagcagcaagctgatgcgtgaagaagaatattggcgttttattgaagaagaaacagccgccggacttccttatgaaaaaccgcagtatcagacgggagccgacagcattcggcaaacggtaagctttacgcttacagaagaagaaacgtccgttttgcttcagcaggtcaaccgggcctaccataccgatacgcaagatgttcttctgactgccgcagctttggctttacgggactggacagggggcggcagactgcgcatcgcgatggaagggcacgggagagagcacatcatgccggagctcgacatcagccgcaccgtaggctggtttacctccatgtacccggtgctcattgacttgaacacagcaggcgctgagcttggaacggctgtaaaaacggtcaaagacacactcggaagaataccggataaaggaataggctacggcattttaaaatacatgacaccgcctgaacaaaaaacaatccgcttcagacaagcgcctgaaatcagttttaactatttagggcaattcaatgatacagaagatcagcccacattcagtttatccggtcttgcgagcgggcacgacatcacgccgacatggcagcgggaacaagcggtggaaatgagcgcgatggccgctcaacataaactgcacttcagtttgagctatccgccgagccgcttccgcaaagaaacgatggaacagctgctgcaaaccttacagcaatatttgcgtgatattatggcgcactgcacaggcaaagaggaagcagaaaaaaccgttagtgattttagcagcaaaacgttaacatctgatgatttggacagcatagcgagttttgtcgaggaactgtagaaaaaggcgacggggagattataacatgacaaaaaagaatgcaattcaggatatttatccgctgtcttatatgcaggaaggaatgctttttcattccctcctgcaaaaggaatcacaggcttacgccgagcaggcctccttttcaataacggggaaggttgacacccgcgtgtttgaagagagcgttcatgcccttttcgaaagacatgatattttcagaacgatctttatcagccagaacgtgtcagtgccgcagcaggtcgtattaaaagagcggaacgtcagcatcattgaggaaaatctcaccaatttaaacaaggctgatcaaatcaagcatattgaagaagccaaacgaagagaccgaaagaaaggatttcacctgcaaaaagacatgctgatgcgggtgacgctgcttcaaaccggtgaatgtgaatatacgtgcatatggagttttcatcacattattatggatggctggtgtctcggaatcgtgctgaaagagttcttccagatatacgcctcgcggctccgccggacaccgttaacgcttgagcccgctgtgccgtacgggacctacatcaagtggctgatggagcaagataaagaaaaagccgcttcgtactgggagcgataccttgaaggctttgagcagcagactgttctgccgaagcagaaaaaagccggcgaaagcagccaagaggaagtgacgttttccttttcaaaagaggacacagctaagctgaaagatctggccgtgaaagaagaggtcacgctgagcaccatttttcacacgctctggggcattttgcttcaggcgtataaccagacagaagatgcggtttttggttctgttatttccggaaggccgtctgaaatcaaaggcatcgagcgaatgatcggcctgttcattaataccgtgcctgtccggatcagcggggcggacattccgtttcaaaagctgatcaaaaacgtgcaaaaggacgctttgaaaggacaggcatacagctatcatccgctttatgatatacaggcgaattcacaggtaaaacaaggcttaattgaccatattctcgtctttgagaattatccggttgaacaggagcttgatgtactgaacagcaagggggacacgaaagacctttttcacatccatgatttcagcatggaagacgaaaccaattacagtttttacctgatggtggcgccgggtgacgagattcacttgaaaatgagatacgattcaagcatgtatgaccgccaatttatcgaaaatatcaaaggtcatttgacacatatcgtttcccagattctcgacaaacctgatatcacgccggataagcttgtaatcatcactcctgaggaaaaagagcagctgcttgcgccgatttctgaagagactgaaaagcctgagtatgacacgattcatgcgatgtttgaacggcaggccgcacaaacgccggatcaaatcgcgatccggtatgaaggcgggtcagtgacgtacaaagagctgaatgaatcggctaataagctggcccgtctgctgcaaaaacgcggattaaagcgggaggagccggtaggcgtcatgctcggccgttctccttctttagcggcggccgttctcggtattttaaaagcgggcggcgcctttgttccgatagatccgggcagtccaaaggagcgtatccgatatgttattgaaaacagcggctgcatccatgttgtaacagagcggcatcagtcactccccgcggaacaaacgctgcaggttacatatatagaagaggccgggacggaagcggacggaagcaatgtgcaatccattaatacggcggacgacctcctttatatgatttatacatccggtacgacagggaaaccgaagggcgtgctgctcgaacataaaaatatggccaaccttctttctgaccaattgacgaacacaggcattgatttttgcacaaatgtgctgcagtacgcatctttggcgtttgacgtctgctatcaggagttattttcagtactcttgagcggcggcaccctttgtatcgtgcccgaatcaatcaaacgggatgtttctcagctgtattcgtttatcgatcagcacaaaacggaagtggtgtttttcccgactgcgtttgtcaagatgcttttcaatgaagaaggttatgcacagtcttttccccgctgtgtgaagcatgtcattacggccggggagcagctgactatctcacgtttgttcaggcagacgctccgtttacacggtatgcagctgcataatcattacggcccgtcagaaacccatgtggtttcaacgtatacgatttctgcgggagatgacatacctgaacatccgccgatcgggaaaccgatccatcataataagatgtatattctcagcaaaaacagacagcttcagcctctcggaattgcgggagaattgtatatttccggagcgaatacaggaagaggctatgtgaacaatccggcgctgaccgaagagaaatttttgccggatccgttcagaaagggcgccgtcatgtaccggaccggagatttggcaagactgcgtgcggacggccaaatggaatacatcggccggacagatgatcaagtgaagatcagagggtaccggattgaaccgaaagaaattgaaaccgttctggcaaatcatcatgccgtgaaagaagctgccgtgctgattcaaacgaatgagtcgggcgaaaatgaattatgcgcctactgcagcgtctcacaagcgactgatccttctcagctgcgaagtgatttggccaaagagctgcctgattatatgattccggtcaaatgggctttcattgacgcgattccgctcactgcgaacggtaaagtcgatcagcgggcccttccggaagcttcggcgtacgcagcgggccgtcgatatacagctccccggaatgtgaccgagctgaagcttacccgcatatgggaagaagtgcttcaaaccggcccgatcggcgttcacgatcactttttcgagcttggcggccattcattaaaggcgacggcactcgttgcaaaaatagctaaagagtgcagcgtgcaaatcccgctgagtgatgtcttcagctatccgactgtagaagaactcgccaaaatcatcggtgaagcagaagagaatccgttcgcatccatagaaaagacagaagcaaaaggaacttatcctgtctcatccgctcaaaaacggatgtatgtccttcaccagcttgaaaatggcggtgtcagctataacattccagccgttttagaggtgaaggggccgtttgaccgagacaggatggaagccgtgttcaaggagctgatccggcggcatgaaccgctcagaacgtcctttgaagaaaaaaacggccggcctgtgcagaggattcatgacgaagtgccgtttgcatttacaaaagaacaatcagccgaagcgtttatccggccgttcgatctcggcaaagcgcctcttttccgggcgggatttgtccaaatagaaaaagaccggcatctgcttttagctgacatgcatcatattatttcagacggcgtatccgtcaatcttttgatacgtgaattcagtgagctgtatgctgagagaagtctgccgccgttacggattcaatacaaagattatgccgtctggcagcaatcatttaaggcgggcgccgcatatcggaaacaagaggagtactggctgaaccggcttgccggggagattcccgtgcttgaattgccggctgataagccgcgtcccccggtgcggagcttttccggtgaccgggtgtcatttgtcatcagcgaaaaacatacagcgcagttgaaaaagctggcgaaagaaaacaaatgcacactttatatgacgctgctcggtgtgtacacggttctgttagcccgtttaagcggacaggaagatatgattgtcgggtctccgattgcaggaaggcctcatgccgaccttgacgccgttctgggcatgtttgtcaatacgctcgctttcaggacgcgtcccgacggaagcatgacgttcaaagaatatttaaaggaaattcgccaaacagcgcttgaggcttacgagcatcaggattacccgttagaagagctcgtcgataagctcggtgtgccgcgggacatgtcccgaaatccgctgtttgacacaacatttgcgctgcaaaatatggaacagcagaagcttagggcagccggacttgaactgcagccggcagacgtcagcctgccgatttctaaatttgacttatcgctgtacatctccgaaaacgccggtgaattgtactgccagtttgaatacagcactgatttgtttgagagaaaaacgattcaaaaatgggcggaatttttcacgacacttgctgaaaacgccgcagctgatccgggtttggaattagacgatatttctgttttgtcagaaaaagaagaagtgtctctgcttcaaaatttcagccccttgcagaaaacagcgtttccgcttcatcagccccttcatgagctgctggaacaacaggcggaaaaaacgccggaccgtccggcgattttaactgatgagatttcgattacgtatcaggaactgaacgaaagagcgaatgagcttgcgcaccggctgatcaaacgggggataaggctggaggataaaactgccattatgggccggcgttctcctgacatgctgatcggcatttacgctgtcttaaaagcaggcggtgcatatctgccgattgatccggattacccggaagagcggattcgctttttactgaaagacagcggcgtgaaattcttactggcagaaccagaacttttcgcaccagatctttttaagggagaaacgatctctctgaaaagcggacaaacaggaaacccggaagctgcggccaaccccaatgttccggtaaagcctgattcattggcttatatcatctatacatccggttctacgggacgcccaaaaggcgtgcaggttgaacatcagtcagccgtaaactttttatactcgctgcaagcgcgttatggattaaaggattccgacaccattttgcataaaacatcatactctttcgatgcttcgatttgggagctgttttggtggccgatcgcgggagcttctgtttttctccttccgcaaggcggcgagaaagaccctgaaatgatactgaacgcattggagaaaaaccgcatcacggcagctcattttgtgccatccatgcttcatgctttcttggaatatataaattccagaaaacagccgatcaaaaagacctgcttaaaaagggtttttgccgggggcgaacaattgggcccgcacttggtttcccgtttttatgaccttctgccgggaacggaattgacaaattcctacggtccgacggaagcgacggtagaagcggcgtacttcgatttgccgcaaggaaaggaatttcacaatgttccgatcggcagttccggacataacatgcggctgtatattttaaatcaaaagaaacagcttctgccgccgggctgtatcggagagctgtatatcgcagggaccggcgtggcccggggctatctgaaccgccctgagctgacggaggagcgctttgtcgttgatccgttttatccgggagaacgcatgtatcagacgggcgatatcgcacgctggacagaagacggccttgtcgaatggctcgggcgttcagacggacaggtgaaagtccgcggctaccggattgaaccgggggaaatcgaagcggcgatccggcgcatcgacggcattcgtgaggcggcggtcaccgcccggaccgaacacggcgaaaccgcgctttacgcctatatcgaaggacgaaaaagcgatgacgtgcgggcagagcttgcggcacgccttccggcctacatgatgccggctcagtttatagagatgagcgaatggccggtcacgccgagcggaaagcttgaccgccgcgcgctgccggctcccggcggagcggcagacagacaggcgtacaccgccccgcggaacgtcacggaaatgaagctttgcgccctttgggaagaggtgctgaaaaacggccccgtcggcatccgggatcacttttttgagcggggcggccattcgttaaaagcgacggctctcgtctcccgcatcgccaaagagttcggtgttcaggtgccgttacaggacatcttcgcccggccgacggtggaagagctcgcttcggttattcaggacttggaagagagcccgtatgaagcgattcagcctgcgaaaaaacaggacacctacccggtgtcttcagcgcagaaacggatgtatgtgctccaacagcttgaagacggcggtgtcggctacaatatgccggctgtgctggaactgacgggcacgcttgaccgtgtccggctggaggagacgttccgggagcttgtggagcggcacgagtcgctcagaacgtcctttgaaacggggcctgacggcgaaccggtgcagcgcatccatgacagcgtaccgtttcagctcgatgaggccgagtcagctgacgcattcgtccggccgttttgtctggaagaagcgccgctcttccgtgcggctctcgtgaaagaatcggatgaacgccatcttttattaacggatatgcatcatataatttctgacggtgtgtccgtcaacaccttgattaaagaattcggcgagctgtacgcaggccgttcgcttgcgccgatgcgccttcaatataaagactatgccgtctggcagcggtcgtttcaggagaaagaagggtaccagaagcaggaagcctattggctgaagcgacttgaaggagagcttccggtgcttgagcttccggctgacaagccccgtccggcggtcagaagctttgcgggcgggaaagtatcgtgcacgcttgacgctgaaacggcatccggccttcaccgcatcgcccgggatcacggctccactttgtatatggtgcttctcgccgcgtacaatacgttactcgcgagattgagcgggcaggaagacatcatcgtcggatcgccgattgccgggcgcccgcacaaagaccttgaaccgattctcggcatgttcgtcaacacgcttgccatcagaacggagccgaaaggagacaaacggtttaccgattatttggcggaagtccgccaggcggcgcttgaggcgtatgagcatcaggactacccgtttgaagagcttgtggaacggctcggcgtgcagcgggacatgagccgtaatccgctatttgatgccatgcttgtcgttcagaatatggaacatgaggaattgctgttggacggtttgcatattcagcctgcggacgtgtcccgtccggtttccaaatttgatgtcactttgcaggcttctgaaggcgggggacagattcattttctgtttgaatatgcggcgtctttattccggaaagaaacgatgcagcgctgggcttcccactttatgacgatgcttgaacacattgtccgtgaaccggaaacttctatacaagcgatcagcatgctgactgctgcggaacgggaccgaattctttcggactttaacggcatgacggataaacagctgcctgaaaaaacagttcatgaactgttcatcactcaggcgcgaaaaacaccggatgcggcagcccttatcagcggggaaacgttggtcacatataaagaattagatgaatggtcgaataaaatcgccagagctctgcaaaaacggcagatcggaccgaatgccgccgtcggcattgtgataccaagatcaccggaacaagtcgccgcagtcttcggggtttggaaagccgggggcgcctacgttccgatagatcctgaatacccggaggaacgcaagcaatatatcatttcagacagcggcacagcgcttctccttaccgtacacggcgcaatagatcaagtgcctgatcattttaaaggtgaagtgctcgcactggaggatatccaagaacaagacgcatcaccggttcagccattatcagcaccggaagatttggcttacatcatttacacgtccgggacgacaggcaggccgaaaggggttatggtcgaacatcgttccgtcagccaaacccttcaatggcgaagcggattttatgatctgaatgagaaagatacggttcttcagcttttttcattttcatttgacggttttgtaacaagtatgttcacaccgctgatttccggtgcgaaagcggccgttttagccgaagatgaagcaagagatattcttgccattaaacactatcttgcatcttaccgcatcactcatatgatcattgttcccgtactgtaccgtacactgcttgacgtactggagccgggggatgcagagtctctcagaattgtcacattagctggagaagctgtcgaccaaaacattatcagccgcagtttatcagtttgtcctcacacggagcttgccaatgagtacggcccgacggaaaacagcgtcgccactacagcggcaagacatatagaacaaagtgagaacattacgatcggccggacgattgagcattcacacgtttatattttaaacggggatcacccgcagccgatcggtgtaacgggagaactttgcatttcgggttccggccttgcaagagggtaccgcaatcttcctaagcaaacggcccaagcctttgtccaagacccgttccagaagaaccggcgcatgtaccgcacaggcgatctggcaaaatggctgccggacggcacgctgcaatatatcggccgaatggacgagcaagtcaaaatcagaggctaccgggtggaactgaaagaaattgaatcggccttaacaggcataaaaggtgtcaaagaagcagccgtcaccgctcataccgcatcagcaggccaaacggaactatgcgcttatatcgtgacagaagaaggaacagaaagtgaaaccgtgcagcaggcgctcagaaatgaaatgcccgcttatatggtgccggcgttctttgaaacacttgaagccctgcctgtcacaccgaacgggaagcttgaccgccgcgcgcttcctgagccgcggaaaaaagcgcacaccggacgggcatttacggagcctgaaagcgacatggaaaaagagctttccgcgatttggagcgaagtgctcggaactgaaaacattgccgcggatcaatcattttttgaactgggcggcgattccatcaaagccctgcaagtatcagcccgattacatcaggcaggaaaacagatcgccgtaaaagatattttcagccggccgacaattagagagctggcgccttatgtccgtacagagcggcagccggtcagccaagctcctgcagaaggagaagtgaagtggtcgccggttcacaaatggttcttcacacaagacatgaaggaagcaaatcattttaaccagtccgtcatgctgacgagaacaaattcaatagatgaagaggctctcaggaaaacgttaaaagccattaccgttcatcatgatgctttgcgccttgtctgcaaaaaagacgaagagaaaggtcttctcctcttcaacagaccggctgacctcgcagatgagcagctttacaacctgaccatattagaaacggaaggcgatgagcatgagaaggaacgttttataaaacgccgcgtcgcagagcttcagagaaacatggatttggagaacgggccgctggtacaggcgggactgttccgctctgaagcagaagattacttgtttctgacggtccatcatctcgctgtcgacgggatatcatggcggattttattggaggacttggcttctgcttatgagcaggccgcctctggacaggaaatcaaactccctccgaaaaccatgtcattcaaaacatatacggagcagctggccgattatgccgaaagcaaacagcttcttcagcaggcggagtattggcgggagattgaacactatgaaacagaaagtcttccttacgagcaggcagatctatctcaaactcctgcaaaaaaacggaacacggtatccttcactctgacagaaagtgaaacggacgccctgttgaaagatgtgcacagcgcctacaatacggatacgcaagatgtgctgttggcttccgccgtgcttgcccttcaaaagtggtcgccgcagcacgctttgaaaatcgcccttgaaggacacggacgccaatcggagcaggcaggtgcggacatcagcaggacagtggggtggttcacttccatttacccggtgcttgtccggagcggagtttatgaacctcttgaagaatatgaaattcgcacattgaaaaccgttaaagacacattgcggcgcattccggataaagggaacggatacggcgtcctcaaatatttaacaccgccgaagcttgccgggatgactttcgggaaagcaccggagatcagctttaattatctcggacaattcgatgcgcccggcgggagtccggcagaaacggaacagcctgacgcgtttcagttttctcctttgggaggcggagatgatgtcacagatacatggaaacgggagcagtcacttgaaatcagcgctattgcggcaaaaggccggatgaccgtcagcatttcctatgaaacggagcgcttccggcaagatacgatcgaacggctgtccgaaagctgccggtattatctcctgaaactgtcggaacactgcctcagcaaaaccgatacggagaagaccgtcagtgactttgatgatcgggagctgactgaggaagccttgcaggatattgccgacttactcagcttccactaaaccgagcgggaggaacacatggacaaaacaaaaaacatccaaaatatttatcccctcagccgaatgcaggaaggaatgctttttcattcctttctgcaaaaggagggggctgcatatatcgagcaatccgtcttcaccataaaaggccggcttcgtccggaattgtttgagcaaagcgtacagtctgtcatcagccgtcacgatattttcagaacggtttttttacctcatgtcgctcagctgaacggcccccgccaagtcgtgctgcgtgagcgggaattccggctgcaccgcgaagatcttacacatttggatgaagcggaacagagcgcctacttacagcgatttaaggaacgtgaccgcttaaaaggctttgacttgcaaaaggatatgctgatgcgtgtgtctttgtttaaaacggctgaggaaaaatatgtatgcgtctggagccaccatcacatccttatggacggctggtgcctcggcatcgtccttcaggaattcatgcatatgtaccgggcgattgaatcaggctcacccgtcacactggcgcccgcaaagccttacagcacgtatattacatggctgactgatcaggacaaagacgcggcttctgagtattggaaaggatatttagcaagctgcgagacaccctcaggactcccgaaaatatcggcccgtccccagggaaaaggctaccgtaagaaagagctcctgttttctttagatcaaaatctgacagacaggctgaaaaccatcgccaaagaagagggcgctacgctcgcggttcttatgcagactgtatggggcctgatgctgcagcgctacaaccggacggacgatgccgtattcggcgccgtcgtatcagggcggccttccgtcattgacggcgtggaaagcatgatcgggctgtttatcaatactgtgccggtacgcattaaaacgggtgacgaaagctttagagaactgctgggccgctgccagaaagaaatgcttgattcagaggcgttcagttatcatccgcttgctgacatccaatctcagactgagctgaaacaggatttaatcgaccatatcatcgtgtttgaaaattatccgattcagcagcagatgagagacgcggaaaaggaatcggatgcaccgttccggatcgggaatgtcaatgtttcggaacaatcgggctacgattttaacctcatcatagcgcccggcgatgagctgatcatcaaattcagctacaatgcgaacgtttatgacgaagtatggatagagagcgtaaaaggacacttggaagaagcgctgcgcggcgccgccttcaatcccgatgttcccgctgatcggcttccgatgctcggacaaaaggaaaaatcaagaataatcggcgaatttaatgacacgaaaacaacgtatgaaagagacgaaagcatcatcagcctgttcagccgacaggtgaagaaaaccccggaccatcaggcgcttcacgccggcgggctgacgatgacgtaccgggagctcgatgaacggtcaactgcgttcgcccgcatcctgctggaaaacggtttggcgccaaaaggaattgccgggattcttgccgaacgctcaccggaatttatcatcgctgttctcgctgtattgaaagcgggagggacgtaccttccgctcgatgcagaactgccatccgacaggatcgccgaaatgctcactgagagcggagcacagctgttaacggtacaaaaagggattgagactgacattgacttttctcacatcatctctatcccggctgcagctgaaaaacaaacagctgatgagggaaaactgaataccgttacgtcacctgatgaccttgcctatattatgtatacatccggttcaacaggaaaaccgaagggtgtgatgatttccaaccgcaacgtcgtatcgctcgtgtcaaacagcaattacacgtcagccggcacgacggaccgtctcattctgacaggatccatcggttttgacgcagtgacgtttgaaatcttcggagcgctattgaacggagcgtgcctccatgtggttgaccgcacgacaatgcttgcccctgagaggttcggcaattatctttcttccaacggtattacgattctgtttttgacgacggcgctttttaaccagtttgcccaggcggatccggagatgttttgcggattgcacaccttatatgtcggcggagaagcattgtccccggcgctcatcaataaggtcagacaccgctgtccgaatctcagcctttataacatatacggaccgacggaaaatacgacattttctaccttttacgaaatcaggcacgatttttctcagccgatcccaatcggaaaaccgatcagcaattcaaccgcgtatatcattgataaaaatggcggacttgcgccgatcggcgtgcctggtgagctttgtgtcggcggggacggggttgccaaaggctatttaaacaggcctgacttaacaagtgaagcatttgtcagccacccggttcatcctgaagaaaagatctacagaacaggggatttggcacactggctgcctgatggaagcatcggatacatcagccgtatcgaccgtcaattcaagattcgcgggaagcgtatcgagccggccgaaatcgaagcgcggctgactgaaattgatggaatcagggaagcggcagtcatcgtgtcagacgaaggacaagaagcaaccctttgtgcgtattatacaggcgcacatgctgaagaaagagccattcgatccctattggccaggtcgcttcccgactatatgattccgcagtatgtgatgaagcttgaccgtatgccgcttaccgcaaacggcaaagtggaccgccgcgggctgcctgcgccggaacggaaaaaagcttcatcaaaagccgttccgccacgaaactgggtagagcgtgagctgatcgacatttggacgccgatcctcggctgcggggagctgggcatacaggatgacttctttgagctgggcggccattctttgaaagcattgcaagtgattcatcagctgaagaccaggcagcagatggacgtcccgattgaaatgatatttgaatatccgacaattgaacaattggctgaaaagctgtattcaaacacactgtcagaagctgccgaacagcatatcagcagactgaatcagccgaaaggccgcaatcttttctgttttccgcctatctcaggtttcggcattttctttaaagatctggcggcggcattaaatggacgggctgctgtgtacggttttaactttattgaagaagacagcagaatggaacaatacattgataaaatgctggaaatccagccggaaggcccttatatcctcttcggatattcagcgggcggcaatacggcattcgaggctgcaaaagcgatggaaaagcgcggcttagaaatcagcgacgtcattatcgcagacgcgtacagaaagcttgacgcactgccgccgcagccaacaaacgcaacagccgaaaatgtcccggaagccgtcagggaagcggtcatcagaaaaacagagcgctatcaaacgtactgggcggaactgataaatgacggccaaattgcggcaaatctccattttattgaggccggcataaaggaagagcacagtgataagaccgagccgatgaaatgggaaggcgccacaacgggagtctaccaggaatatcagggcgagggagcccataaagatatgtttgagcccgagtttgcacacaaaaatgccgaggtcatactggacatcatcgcaaacagcggaagacgcttggcgcggaatctgtaacatccggcagaatgactgaagaagacaaagggcaagataggggaatcacactcagtttttttggaggctttgagatgacgaacctatcttggcttacgtatgtaatgattattcttgccagctaccggctgacccatttgatcgtatttgataagattacggaattcataagaaaaccctttataaagcaagaaaaaaccgtcgatcaaaacgggcgcgccgtccaaaaaaaagtcccttcctccgcattcggttatatgctgcaatgttattggtgtgcgggcgtctggtgcgccatattgatcggcatctgctatttggtctggccccgctatgcacatccggttattttcattttgtccattgccggagcgcaggccattcttgaaacatgcgtcggcgtcggaacgaaggtcattgacgtgctcgccgccataaaacataaaaagtcctgaagcgttttgattcgctttaggacttttttctttcccttttaggctgagaggagcaaagcaggctttctgattcaccgcccggaatgcttcggaataccgtaaagcagagagggggaaaaacatgaaaagctgccgttttagcatgatatggtttttggccgttgtactgacagccggcatctttacgttctcagcatccgcacaagcaagcggcactcagccggagagagaaatgcgagccgtatggatcgcgtctgtcaccaatatcgactggccctctaaaaaagggctgtcaccggaagagcaaaaaagagaatacagcaagctgctggatgacgttcagaagatgggaatgaacgccgttatcgtccaaattaagcctgcggctgatgctttttatccatcagattacgggccttggtcagagtatctgacaggaacccaaggcaaaaatcccggctacgatccgcttgcttttttagttgaagagacacataaacggaatcttgaatttcacgcttggttcaatccttaccggatcacgatgaatcacacaaatttgaatgcgctttcagatgatcatcccgcgcgttcccatccggactgggtcgctgcatacggaaaacagctgtactataatccgggcattccggaagtaagacaatttataacggatggaatcaaagaagtggtcagccgttatgacattgatgcggttcatatggatgattatttttatccttataaaattgccggacaggaattccccgatcaggcggaatacgaacggtacggaaaagctcactttgcatcgattgatgactggcgcagggataacgtcaaccggcttgtaaaagaaatcaacgaaaccatcaaacgagaaaaaccttatgtcaaattcggaatcagcccgttcggcgtatggagaaatgccgcagatgatccgacaggctccgaaacggccgccggggtgcggaactacgatgacttatatgctgatacaagagaatggatccaaaaaggatacattgattacatcgcaccgcaaatttactggagtatcggatttaaagcggcggcatatgacgtcttagcggattggtggggaaaagaagtgaacaatcggccggtgcatttatatatcgggcaggcagcttataaaatcaacaacaatactgatccggcctgggccgacccgggggaatacggaagacagattacgctaaacagaggatcagcatggataaaaggcagcatgcatttcagtttaaaggatttaaaccgtaatccgctcgatgtgaaaaaccgtttgatcaatgacatgtacagccggcccgcattaattcccgagatgccttggctcggacattccgctttaaaaaaaccggctgtcaaacgggcggagaagaacgcttcaggccatacactctatatcgaagatgcgaaatccaacggtaaaaaaacggcttattacgccatttaccgcgcagaaaagggaaagcagccttatttagtggatacagtcagaaaaacatcgtcacggacgcagacattttcagatactgttattcgggcggaagaagcatgcacctatatcgttacttccgttgacaggcttcaccatgagagccgtccctccgcaaaacggacgattaaatagccattattaataaaactgacagttgcggcactgtcagtttttttttgcggcggatgagtccgaatgttcagactttatttggatggaatgaataaagacccccattaataaaatgtagaaagcagcagaaggaggaaggttaatgaattttcaactgacaaaagaacagcagatggtgcgcgaaatggtcagagatttcgccaaaaatgaaattgccccgaaagcccatgaggttgatcaatcagccgtcttcccgatagacacatttaaaaaaataggcgaactcgggctgctcggaattccgtttccggaagaatacggcggggcgggcggtgacaccatttcatatgcagcagcggtcgaagaaatcggaaaagcctgcggcagcacggggctgagctacgcggcagccgtgtcactcggcgcaagcccattatactatttcggtactgaacagcaaaagcaagaacatcttgttccgcttgcttcgggaaaagcgctcggatcattcgggctgacagagccgaatgccggttcagatgccggcggcacccagacaaaagccgagaaaaagggcgatgactatgtgataaacggagaaaaatgctggatcacaaacgcaaattacgcccgcacggtcattgtcaccgccgttacgggaaagaactccgccggaaaaccgatcatttcagctctcatcgtcccgacagacacaccgggatttacgatcacaaatccgtacgacaagatgggtgtgagaggatcggatacggccgagcttgtgctggaggatgtcagggtgcctgccgataacctgctcggtgatcctgaaaaaggttttaaacaatttttatatacattagacggcgggcggatctcgattgcggcactggctgtcggtatcgctcaaggcgcactggaggcgtcgctgtcatatgcgaaggaacgcaagcagttcggcagtccgatatcgtcatttcaagccattcaatttaagctggccgatatggcgatggaaattgaccttgccagacaaatggtgcttaaagcggcatggctgaaggatcaaaacctgccatttacgaaagaagcggcattcgccaagctttatgcttcagaaatggccgtcagaacctgccttcaggccatccaaattcatggcggttccggttatatgaaggaatgcggtgtcgaacgtatgcttcgtgacgcaaagctgatggagattggagaaggaacatcagaaattcaaagaatggtcatcgcaagacagcttttgaagtgaaatgaaaacgtttactaagacagggatggaagggggcaggtcatatggctgaacttatccatttaacagccggaaagctgcttgagcggaccgcggagctttttccggatcatgaagcggttgtttaccctgagcgcggccttcgttatacgtatgccgagtttgaccggttatgccggcaaaccgcaaaagggctgatgaaactgggaattgaaaaaggagatcatgtggccatatgggcatccaacataccggaatggctcgcggcgcaatttgcaacggcgaaaatcggcgctgttctggtcaccattaatacaaattttcaaatcgcagaactcgattacctgctggcgcattcagacgtctcggccctgataatcatggattcctaccggcagacatcttatgttgagatggtgaataagctgattccggagctgaaaacttgtgagcacggcaggctgcgttcgaaacgttacccctttttacggacggtgttatatatcggtgataaaagtccgcccgggatgcaccgctgggattctttgctgaaggaaggcgaagctgtaacggatgcagcgcttgacggaaggatggacagcctgaaaaaggatgattgcattcatatgcaatatacatcaggtacgaccggatttccgaaaggcgtcatgctctcacattttaatatcgtaaataacgcggccaatatcgcagaatgcatgaagcttacttcaagtgaccgtttatgtattcccgtgccgtttttccactgcttcgggtgtgtgcttggcgtgctggcatgtgtttccgcgggtgcggcgatgattccgatcgaacagttttctccaccggccgttctgaaaacggtggagcaagaagcctgcacggctctgcacggtgtaccgacgatgtttatcgccctcctaaatgacagccgcttttctgaatatgatctttcccacgtccgaaccgggattatggcaggctcgccatgcccggcggaagtcatgagagaagtgatcggcaaaatggggatgaccggcattaccattgcctacggacagaccgaagcatcacctgtcattacgcagacaagaacggatgattcatttgaaagaagagtggaaacagcggggcgcgcgcttccccatatcgaagtcagaatcgttcggcccggaacatcccaagaagccgaccggggcgaacaaggagagctctgcacccgcggatatcatgtcatgaaaggttactataaaaatcaagaagcgaccgaagaagcgatagacaaggacggctggctgcataccggtgatttggctgtcatggacgaggacgggtactgcaaaatcacgggccgtctgaaagacatgctgatcaggggcggcgaaaatatctatccgcgcgagattgaggaaatgttatatcggcatcccgcagtggcagacgttcaggtcgtcggcgtgcctgatccgaaatacggagaagaggccgcggcgtgggtcaggctcaaagacggacaaaccgcttccgcagaagacatcagaaccttttgcaaagaacatatcgcccgctataaagtccccaggtatgttttgtttacagatgaatatccaatgacagcctcaggaaaaattcagaaattcaagctgcgggaaaaaacgattgaagagctcaagttaacttaatgaaaaaggagtgcttcacatttgtttaaaaaagtcctgattgccaacagaggagaaatcgccttaagaattatccgcacctgcaaacgtctcggcatcccctcggcagctgtgtattcagaagccgacagggacgcgctgcatgtaaaagcggctgatgaggcctatccgatcggtaaatcgagagtaaatgaaagctatttacatatcgacagaatcatagaagccgccaaatccgccggagcggacgccattcatccgggctacgggctgctgtcagaaaacagcctgttcgccgaacgctgccggaaggaacaaatcacatttatcggcccgcccggtgatatcatcgccaagatgggcagcaagatagaagcccgaaaaacgatgcaaaaagcaaaggtcccgatcgttcccggtgtttcagagccattgcccgatgttcactccgccttagccgaagcccgtgccatcggctttccggttatgctgaaagcgtctgcagggggaggcggaatcggcatgcagatcgtacattcagaagaagagctggccaaagcgttcgaaggcaatcaaaagcgggccgcgtccttttttggagacggcgcaatgtatatggaaaaggtcattgaaaatgcccgtcatattgaaattcagattctcgcagattctttcggcaacaccgttcatctgtttgaacgtgactgttcagtacaaaggcgccaccaaaaagtgatagaagaagcgccgtcgccgtttgttgacgatgaattaagacaaagactcggtgaaaccgccgttaaagccgctaaatcgatcggctaccaaaatgcaggcacaatagaatttctcgtcgaccaaaagaaacaaatctattttttagagatgaacacaagactgcaggtggagcatccggtgacagaagaaattacaggactggatcttgtggaagaacagctgaaaatcgccgccgggcaggcgctgactttctcgcagaaagatatcaaccaccgcggtcatgcgatagaagtgcggatctatgcggaagatccggtcaccttttacccgtcacccggtaccatctcgtctttttccgttttaagacacccgtcagtgcgacacgaatgcgccgtcgaaaagggaagcgtcatttctccgttttacgatccgatgattgccaaaatgatcgtcacggcgaatacgagaaaacaagccattgaacaactgaaaaccgcccttggcgaatatcatgtagaagggattaaaaccaacattccgctgcttacaaaaattgcacattcagaagtgtttgaaaagggtgaggcaacaaccggttttttacaaacaatgaacgagggggcgtcaaaatgagcgtcataaaaattcagatggcgggaaacctgtggaaaattcatgtgaagcccggtgatgtcattgaagaaggacaggaagtggccatcttggaatctatgaaaatggaaattccgattatcgctgatgcagcgggtacggtgaaagaagtgaaaaaatcagaaggtgatttcactgatgaaggagaggtcctgattgaacttcaataaaacgggaggtgcagcatgaactgtccggaatatgtccgcatcaatgaagtaggaccgcgtgacggcttgcagaatgaatcggcgtgggtggatacagaagataagattgagtggatcaatatgctgtcaaaaacaggccttccctatatcgaagtgacatcattcgtgcatccgagatggattccggctcttcgtgacagcctggacgtcgcaaaaggcattgccaggtctgaacatacggtctacgcggcgctcgttccgaacctcatcggactggagcatgcggcagaaggcggaatcgatcaggcctgtgtatttttatctgcaagcgaaacccataaccaaaaaaacgtaaacaaaccgattgaccggaccgttcaagagctcaggcgggttattactgaagcaaaagctgaaaaaatggcgacgagagcttatctgtccactgtgttcggctgtccgtacgaacagaacgtgccggtcgaacaagtcatccgcctgtcagacacactgctcgaaatgggtgttgatgaaatatcgctcggcgacacgatcggcgcggcaaaccccttgcaggtcatatccgtgcttgaagcccttttgccgagaattcccgcctcaaaaatcgcactccatttccatgatacaagaggaacggctctagcgaatatcattcccgctcttgatatggggattacatccttcgatacttcctcaggcgggcttggcggctgcccgtacgcccctggatcagcaggcaacgctgccacagaagacgtcatttatatgctcgaacaaatggggattgataccgggacggacatgaataaacttcttgatgccgcccgctggatcgcggataaaataggcaaagatctgccaagcagaaatctgcaggcattcagaacgaaatgagaaaggagaagccatgggagattgcgtcttgtattccgtctgtcaagaaacgatcggtctgatcacgctgaaccgcccgcatgcggccaactcgctgtcttcagaaatgattgatcatttacagcgtgtgattgaagacatcaaaaactcgccatccattcgctgtgttattctcaccggctccggaaacacattttgcgccggcgctgatttaaaagaaagagctgggatgaatcatgaacaagttaagcaaagcgtcaggcgtatcggtgaaacggctgcatccattgaagctctcccgcagccggtcattgcagcgctgaacggaaccgctgtcggaggaggccttgaactcgctctcgcctgcgatatcagaacagccgtcagccgggcgggcctcggccttcctgaaacagggcttgcaatcattcccggggcgggcggaacgcagagactgccccggcttatcggccccggcgcggcaaaagaattgatctataccggccgaaggctttctgccgaagagggaaaagacatgaagctgatcgagcatgtttgtgaagccgatgaacttatggaaaaagcaaaagcactggccggccgcatcgccgctaatgggccgatcgccgtcagacaagcaaaatccgcgataaacaagggtctggagacagatctcaatacagggctcgaaatcgaacgaaaagcatatgaacaagtcatccctacacttgacagagaagagggcctgcgcgcttttaaagaaaaaagaccccctgaatacaaaggaaaataaaacatggagggactcggatggattacgaaaaagaacggcagacacgcagcaaaacgattgaaaagggaggagccgcgaaatatcatgcaagcaacgaaaagaagggaaaactttttgtaagagacaggctgaagcttttattcgatgacggcatatccgttgaagacgcttttttcgccgagtgcatgtcagacggactgccggctgacggggtcgttaccgggatcggaaccatcggcggcagaaccgtttgtgtgatggcaaacgactcaaccgtaaaggcgggctcgtggggcgcgaaaacggtggaaaaaatcatccgcattcaggagacggcggagaagcttcagtgtccgctcttgtacttagtcgattccgcaggtgcgagaattacggatcaggtcgacatgttcccgggcagaaggggagccggccgcatcttttataatcaagtaaagctgtcgggccgcattccgcaaatctgtttattgttcggtccttccgctgcgggcggcgcttacattccggccttttgcgacattgtcattatggtcgaaggcaatgcatccatgtacttaggttccccgcgcatggcagaaatggtgatcggcgagaaagtatcgcttgaagaaatgggcggcgcccgtatgcattgttctgtatcaggctgcggtgatctcctcgccccgacggaacaggaagcaatcatgatggcgcagacatatctcagctactttccggcaaattatactgaaaaagcgcccgtcaacaaatctaagaacccgaaagcttttgaaaaaccgctctcagatgtcatcccggcacatcaaaacgcaccgttcaacatgatggatttaattgaacgtgtcattgatgaagactcgttttttgagattaaaccgttatttgcgcaggaattaataacggggctcgcgcggattcacggacagccggtcggcattatcgccaatcagccgcgtgtcaaaggcggagttttatttctcgattcggcggataaagccgcaaaatttatcgctttgtgcgacgcattccatattccgcttctgtttttagcagacattcccggattcatgatcggaacgaaggtggagcaggcgggcatcatcaggcatggcgcaaaaatgatctccgcaatggcggaagcgactgttccgaagctttccgttatcgtcagaaaagcctacggtgccggattatacgcgatggcggggcctgcttttgaaccggactgctgtttagcgcttccgactgcgcaaattgccgtaatgggtcctgaagcagcggtgaatgcggtctacgcaaacaaaatcagcgagctggcccctgaagaaaggccggcttttattcaagaaaagcgtgatgaatataaggaagacattaacctttaccggcttgcctctgaaatggtgattgacggcattgttcctgctgattccttgcgggaagaactcaataaacgcctcactgcttacatgtccaaacaactgacattcacacaccggaaacaccccgtatacccggtataaataaaaaaagactgcatagatccggctcgcagccgttcttatgcagtcttttttcacagtcttgatctcattttcttcacaacaaaataaacaacaataaatacgagagccaatataatgatcggagttgtatacattccggcatagctgtctacgtctttccactgtcccccgagctgatacccgagataaacgaaaatgacagaccacggaataatggcaagcgtcgtcaatatgacaaacttggaaagaggcattttcgcaaggccggccgggatggaaatcgcatgtctgacgaccgggataaaccgcgccgagaacacaacgccggcgccgtaacggcgaaaccagttttccgcaacatcaacatgatgctttttcagaagtaagtacttgccgtacttgtccaaaaacggccgtcccccataacgggcgatccagtatataaagcactgcgcgatcgttcccccgatcacaccggcgacaatggcgccgataaagctgatcgtgccttctgacaccatatagcctccgtaagccagaacgatttcactcggaatgatttcgatcattaatccgagcgcaatccctaaatagcccatacttgtcagccaggataatatttcactaataaaattgcccacactgttcacaacctctttatctttttacccaattatatgactgattgacaagcaaaatggttacaaattattttttaacgcacgatttcttcagattctctttttaacacctcttctaaataagctaaaagtttcggtctcatttcttcccgcagaagcccgatctccgtgccggccttaaaacagccgaacttatctcctatatcaaaccggcttccttcaagctcccgcgcgtaaatgcttcgggtgcggcatacttcgcgcagcgcgtctgtcaattggatttcgctgcccgcgcctcttccgatcgtcttcagcgctttaaaaatggcaggggttaatatgtaacggcccaacacggcaatatgagagggcgccttttcaacggccggtttctcaatcagatcctcaacccggtacacatgaccgctctgccgccccgtctgtataataccatatttgctgacatcagcaggatcgacgggctgtacgccgatcgtttctgtgccgtgttggttatagacgtctatgagctgtgaaagagcgggagtgtcagataccataatatcatcacctaatagaacggcaaaaggctcatctccgataaaatgctccgcacacagcaccgcatggcctagtccgagcggttctttctgacggatgtaatgaatattggccaaatcggcaatccgctgcatttccttcagtgtctctgacttgcctttttccttaagattgatttccaactccgccgaccggtcaaaatgatcttcaatcgagcgtttgtttctccctgtaataatcagtatatcttcaattcctgactctcttgcttcttcgacaatgtactggatggccggtttgtcgacgatcggcagcatttctttcggctgcgcctttgtcgccggcagaaatctcgttcctaaacccgctgcggggatgaccgcttttctcactttttttctcattcatcttcactcctgatcctgtatgtttttcagcgaatctccaaatacccagattcggtttccgataaaattcatcatcattccgccgatagtggcggcgagcttactcaccaaaagcgaacagccgcctttttgaaacgcgtacagcagcaaaaaggtgattcccgacgctgcaagattaatgatgagaaagcgcacgatctctttcccgtcagccttgtgttttacacgaaacgtccacttccggttccacacatagctgttgatgatccctgccgaataggagcagatctgcgccggcagataggggacaaggcaagcggtgagaagaaagaagacaccaaaatcgatcagcgtattgccggcgcccacggtgcaaaaacggcctgctgtctttactttttctttcagcataacggcatccggttttgacctcccttcataagtaagatgcggatcgctgtcctatttgttgatatggattactttagcggacagtgttgaataaacaattactaaaatatgaacaaaacatgaaaacgtaatgaggctttgtaaaacccattaagttaacagttttatattttaggttgacatattacgtgcaagacactaatattctgtattagtgttaaccttttattattttggttaacattaaatttcgaaataaaagaaaggagggaaatttcatgcaggaagagacctattacagcgtcagaatgagagcttcccgaaacgccccccatgagcagggcggaaaacatatttccggcggagaacggctcatcacttacagcggtttacaggaagcggtagatggcttattacataaaggcttctcacactcaagagggatacctgattttatgcagattcagcttgaaagcgttcatgaaccgatcgaaacgatccgccctttgccggttgccctccatcaaacagacacgccggaaaaaggacaagcaatcgcccgcaagcttctgcaaaaggcggggattcctccgcacatgatcgagaaagcgtacgaaaacatttcggaatatgcagaagcaagaggagcggtcctgtttgatatccgggcaggaaaacgcattgactgcagagggaatagaggtgtgcgggtatcccgagtggattggccgtcacctgattttcaaaaatgggcttttactcacaacatgccggaaaattcacgaataaaagaagcacatgccatcgcggcaaaagtttgcgcacatccgggaattattgccgaattgtgctggtcagatgaccctgattacataacaggttacgttgctgcaaagaagctgggatatcagcggattgccaagatgaagaatgccggagatgaaagcggatgccgggttttctttactgatggctccatagatacggagagctgtatccattttttagagaagcagcctgtattcattcagcgggaggagaacatatgaaacaatcaatgattgaaaaaagcaaacagcatctttggctgcctttcacacaaatgaaagattacgatgaagatccgttcatcattgaaagcggaaacgggatcatgctgaaagacatcagcggaaaagaatattatgacggcttttcttcagtatggctcaatgtacacggccaccgcaaaaaagaaatggatgaagcgattcaaaaacagcttgaaaaaatcgctcattcgactttgctgggtatgacgaacgttcccgcaacagaacttgccgagatgctgacgggcatcacaccggaaaagctgacgcgcgttttttattccgacagcggagcggaagcaatggaaatcgctctgaaaatggcctttcaatactggaaaaacgtagggagacctaagaagcagacgtttatttcgatgcagaacggctatcacggcgatacaatcggagccgtcagcgtcggctccattgaactcttccaccatgtgtacggcccgctgatgtttgaaagctacaaagccccgattccttatgtatacagatctgaaagcggtgaccccgtacagtgccgggatgaatgccttcacgcgctcgaacagctgcttgcaaagcaccacgaagagattgccgcacttacgattgaatcgatggtgcaaggcgcatccgggatgatcgtcatgcctgaaggctttctggcaggcgtacgaaagctgtgtacggcatatgatgtgttaatgatcgttgacgaagtggcgacggggttcggccgcaccggaaaaatgtttgcctgtgagcatgaaaacgtccagccggacttgatggcggcagggaaaggcattacgggaggctatttgccgatcgctgtgacgtttgccacagaagccatttatgaagccttctacgatgactacgacaaaatgaaaacatttttccacggccattcctatacaggaaatcagcttggctgtgccgcggcaattgaaaatctgcgtttattcgaatcagagcgcatcgttgaacgagtcgccgaaaaatcaaaaacggctgcggaatttcttcatgatctgaagctgcttcctcatgtcggcgatgtccgccagctcggtttgatgtgcggcatagagcttgtgcaggataaggggacaaaacagccttatccgcctgaaaagcggatgggatacaaggtgtccttgaaaatgagagagctgggtatgctgacacggccgctcggtgacgtcatcgcctttcttccgccgctcgccagcacaaccgaccaattacaagccatgatctccattatgaaagaagcgatagccgaggtgaccggccgtggattttgacggatggctcctcggaaggctcgatgcggtgaaaagagacgggctgtatcggacgctgcgaacacaggaaaccgctcttaaaaccaaggggcaaaagcggcagacctgggcgtccaatgactatttaggtctgtcaaaagatgaacggctgatcacagccgcgcaaacagcgctgagccggttcggagcgggaagcggcggctcacggttaacgacaggaaatactgtgtggcacgaaaaacttgagcaaaaaatctccgactttaaacagacggaagcggctttattattttcaagcggttacttggcgaatatcggcgtgcttgcctcactgcctcaaaaaggcgatgtcattttaagcgatcaactgaaccatgcgagcattgttgacggctgccgtttatcaaaagcggaaaccatcgtgtaccgccatattgatatggctgatcttgagaaaaaacttgcctccgtccagactcggaaccgccgctttatcgtcacagacggcgttttcagcatggacggcaccatcgcgcctcttgaccgaataatgccgcttgcaaagcagtaccaggcatttgtgatagcagatgacgcgcatgcaaccggtatactcggggaaaacggcggaggaaccagtgactatttcggtgtttgtcctgatgttgtcatcggcacattaagcaaagctgtaggaacggaaggcggttttgccgcgggatcaaacatttttattgattttttgctgaatcaggcgcggacgtttatttttcagacggccctcccgccgtcaatttgtgcggcttcgcatacggcatttgacctcatatcagatatgcacgatacgcgccgtgagctgcagtcgtctgtcaaaaagataaaaacgcgtctggccgatatgggctttactgtaagaggcggagatacaccgattatccccgttatcatcggtgatgcaaaaacagcggtttcagccgctgcgctgcttgagaaaaagggaatctgcgccccggccatccgcccgcccgccgttccggaaggcgaaagcagaatcaggctgaccgttacggcggatcgcagcttacaggacatagacgagctgacggaagcatttgattccattagaaaagagctgaatataaacaaatgagaagtttttttgtcacaggaacagataccggcgtcggaaaaaccatcgtttcttgcggacttgccgcggcattcaggcagaaacaggcggatatcggagtgtttaaaccgtttttaagcggcgtgccgcggactcatccggaaagtgacacctcgctgttgaaaaacatgtcacaaaccgcactgtctcatgaagaaatcacgccatttgaatggaaagagccgcttgcgccgtacacggccgccatgcttgaggggaaatccgtgagcatggatgaagtcatggcccactggagtaagatcaaaaatcgtcatgagtgtttcatcgtcgagggggcaggcggcatttccgttccgcttggtgaaaattacttagtcagtgatttgataaaagccttggaattaccggcagtgattgtcgccaggcctgatctcggaaccatcaaccacacatatttaaccgttgaatatgcgaaaaacatgggaatagaggttctcggtattattatcaacggcgtaaagagccggccggggctggacgagaagacaaacccgagcatgattgaaacattatgcaaagttccgattttgggaatcacaccgaagctggatcacgtttcaccggaaaacattcaacacatgattgagaaacatatagatgtttcctctttcatgaatctgacacaaatggggagataaacatgaatcaatggatggatcttgcagagagagttctggacggggcggaagtaacgaatcaagaagcgctggccattttaaattgtcctgatgaggatcttttattgctgatgcatgccgcttttcatatcagaaaacgattttacggaaaaaaagtaaagctgaatatgattatgaatgcaaaatcaggcctgtgtccggaaaattgcgggtactgttcacaatcttcaatatcaaaagcgccgatcgagtcttatcggatggtggataagcatatattgcttaagggggcaaaacgcgcccatgacttgaatatagggacatactgcatcgtcgccagcgggcggggaccgtcaaacagagaagtagatcaagttgttgatgctgtcaaagaaattaaagaaacttacggtttaaaaatctgcgcatgcctcggtctgctgaagccggaacaggcagagcgcctgaaacaggcaggagtagaccggtacaatcataacatcaatacatcacaaaggaatcactcaaacattacgacttcccacacgtatgacgacagggtcaatacagtggaaacggcgaaacaatcggggatgtcgccttgttcgggtgtcatcgtcggcatgaaagaaacgaaacaggacgtcattgatatggcgaacagcttaaaagcgcttgacgccgacagcatcccggttaattttctgcatgcgattgacggaactccgttagaaggggtaagcgaattacatccggtgtattgcctgaaagtgctcgccttgttccgttttatcaatccgacaaaagaaatccgtatctcaggaggccgggaagtcaaccttcgttcgctgcagccgctgggactttacgccgcaaattcgattttcgtcggagattacttaacgacagcagggcagcatgaaacagaggatcatcaaatgctccatgatttagggtttgaagtcgaatccgttgaagaaatgaaagccggcctgcaatccgcctgcaatacggaggtataagatgacggcgggcctatcgactgcacatccgtccctccatgcggattcggatttttggaatgacccttacccgttttatgaaaaactgcgtgccattgatcctgtttataaaggaaccgtattaaaacatccgggctggtatgtcaccgggtataaagaagcggcagcgattttgaaagacacccggtttaaaaaccgcgtcccttttccggaagcttcaacgaaatatcaaaatctatctcatatccagcacgatatgctgttatttaaaaatcaatcagaccataagcggatgcggatgcttataggtaaagaatttaccgcaaagacggcggaatcacttcgcccctgtataaaagaaacggttcatgacttgttggatcaaatccaaaacaaaaaaaacgcagaccttgtttcagagtttgcctttccattggcaagcctcatcattgcggagatactcggagtgccgaaagaggagagatatcaattcagacaatggacggcagacgtcattcaggccattgatcttacccggtcaagaaagatgttagtcagagcaagcgacaccgcaggcaggctgactgcatatttcagagatttgattcacgagcggaaagcacatcctcaggaagacttaatcagcaggtttattatgggggaacagctttcaaaagacgaagtgctcgcgacatgtatcttacttgtcatagccggacacgagacgacggtaaacctcatgagcaacggtgtgtttactttattgaaacaccctgaacagcttagcgcactgagagaaaacccctcgcttattgaaactgctgtcgaggaatgtctgcgctacgacagccccgcgcagctgacggcacgcaccgcttcagaagactgtgaaataaatgggaagaccataaaaaaaggagagcaggtatatatccttttaggggcagccaatcgcgatccaagcatattcgatcagcctcataaaatggacatccaaagaaaaccgaatccgcatcttgcattcggaaagaacgcccatttttgcataggctcctcattagcgcgcatcgaagcacaaattgcaattctcacactgtttgagcggatgcctaagcttcggctggccgcacaccgccttgaataccgcaagctcattggttttaggtcgctcaaagagcttccggttgtccttggctgaatgaccatgcaggagggccggattttatcggttcctcttgcaggaaataaatgaaagaaaaaagaatacatatttataaagcaaaaatcctctctgatccatctcactatccctaaaaaaactcgctgctcagccattcaatatcatacagcaagaatctccttttctttcgccaaaacggaaaattcaccatgatgcacattttttcagcctcagaaacggtgcaaaatcggcatgttttctgctttattttcttgatctttgtaagcgcttactaatattgagcagaaaagagggggatttgtggacattgttattattttattggcattaggcatgctgatgtttgcggcttaccggggcttttcagtcattttattcgccccgatttgtgcgctgtttgccgtgctcctgacagatccaagcttcgtacttcctttcttctcgaatatatttatggagaagatggtaggatttattaagctgtattttcccgtatttcttttaggggccgtttttggcaaggttgttgaaatatccgggctcgccgagtcgattgcaaaaacaatcgtcaggcttgtgggagcaaaaagagccattctcgccatcgtcttaatgggtgcgattttaacgtacagcggcgtcagtctcttcgtagcggtgtttgccatttatccgtttgctaaaaacctatttattaaagctgatattcccaagcgtctgatacccggtacgattgcattgggcgcgtttacttttacaatggatgcgcttcccggcacaccgcaaattcaaaatgtcattccgacagctttttttaaaacaaacatttatgccgctccctggctcggactgattggcgcagcatttgtgcttacggccggaatgatttatttagaatcccggcgcaaaaaagcggccaatgccggagaaggctatgctggatttcaatctgaagtttccgctgcagaggattcctcaagtctggctaatgaaaaacatacgcctgttttaccgcaggaggcagaacccagccccgcgcggcaagtgctcgcctttgttccgcttatccttgtggggatcatgaacaaatgcttcacgatgtggctcccgcattggtaccctgacggatttgattttgcgcagctcggtttaaaagcgttcgggaagattgacctttcctccgtcactgcgatctggtcagtagaactcgcactgctcatcggaatcatgacaacgattttgttcgattggaaaaaagtgctcttcaatttgaaagaaggactgaatgagggcatcgggggtgccttgctggcgtcgatgaatacaggagccgaatacggatttggcggcatcattgcggcgcttcccggctttaaaatggtcagcagcggcatatcgcagacgtttactgatccgctcgtcaacggagcggtgacgaccactgcgcttgccgggattacaggatcggcatcaggaggaatgggcatcgctttaagcacgatgtcagcagcatatacagaagcaatcaatacattccacattccgccggaggtcatgcaccgggtgatttcgatggcctccggcggaatggacactcttccgcataatggcgccgtcattacgctgctcgcggtcaccgggttgacccaccgccaatcctacagggatatctttgccattaccgtcattaaaacagcagctgtgtttgtcatcatcgccatttacagtctgacgggccttgtgtagccaaaacagaaaggggaaacgaatatgggaaaaggaaaagtgatggactcttataaagatgctgctgcactgatcaaggatggagacaccctcatcgcaggaggcttcggcctgtgcggcattccggaacaattaattctcgcgatcagggacagcggcgtgaaaaacttgaccgttgtcagtaataactgcggtgttgatgattgggggttaggcctcttgcttgcaaaccggcagatcaaaaaaatggtcgcatcctatgtcggagaaaacaaaacctttgaacggcagtttttaagcggggagctggaagtcgaattggtgccccaaggaacgctcgcagaaagaattcgcgcgggaggggcgggcattccggcgttttatacacctgcgggcgtcggaacatcagtagccgagggaaaagaacataagacatttgacgggcgcacctatcttctggagaaagggattacagggaacgccgccatcataaaggcctggaaagccgatcctctgggcaacctgatgttcagaaagacggcgagaaatttcaatccgctcgctgcaatggcaggcaaagtgacgattgcagaggctgaagaaatcgtcgatgccggagagcttgatccggatcaaattcatacgccgggtatttttgtgcagcatgtgctgcttggcgggattcatgaaaaacggattgaacgccgcaccgtccggcaagcatgataaaggaggctgacagaatgagagatagcagaaaacgaatgatcaaacgggctgtaaaggaaataaaggacggaatgaatgtgaacttggggatagggatgccgacgcttgtagccaatgagataccgaatgattataacgtcctgcttcagtctgaaaacggcttgctcgggatcgggccttatccggcggaaggaacggaggaccccgatctgatcaatgcgggaaaagaaaccattaccgaggtaaagggagcctcgtattttgacagtgccgaatcctttgccatgattcgcggcggccacattgatgtagcgattctcggcgggatggaagtgtccgaacggggagatttggcgaactggatgatccccggaaaaatgatcaaaggaatgggcggcgccatggacctggtgcacggagcaaaacggattattgtcattatggagcatgttaataaatatggggaatctaaagtgagaacggaatgtacgctgcctttaaccggcaggcaggtggtcgatcggctgatcacagatttggctgtattcgattttcatgatggccgtatgacgctcaccgaactgcaggaaggtgtaacaatggaggaggtctttgagaaaacagaaggtcattttactgtcagccagtcgttaaaaaacggggtcagaccaaaatgaggaggtgccgccatggattcattgcttattgaaaaaacagccgttgtaacaggagcagccggaggaatcgggcttgaaattgcaagagaattcgcccgtgaaggagcagccgtcatcatctctgatgtaaacgaacaagcggggaaagaagcggcggcaggacttaaagatgaaggctgtgaagcagtcagcatcacatgcgatgtaacaaatgaaaagcaagtggccgacatgctgcagacggtcgagaaacaattcggacgtctcgatatccttgtgaataatgcgggcattcagcatgtcgcgcccatcgaggaatttcccaccgaacagtttgaacggctcattcgtgtcatgctgactgcgccatttatcgcaatgaagcatgcattccccattatgaaaaaacagcaattcggtcgaatcattaatatggcgtctgtcaacgggctgatcggttttcacgggaaagcggcatataacagcgccaagcacggcgtcatcggtttaacgaaagtcggtgcacttgaaggcgcggctgacggcattaccgtcaatgcgctttgtccgggatatgtggacactcagcttgtccgcaatcagttaaaggacatttccgcaacaaggaatgtaccgtacgagcgggtgcttgaggacgtcatctttccgctcgttccccaaaaacggctgctgtcagtgaaggaaatcgctgattacgctgtatttttggccagcgacaaagcaaaaggggttacaggtcaggccgtagtcatggatggcgggtataccgctcaatagttcttatatttttttaaaaacagccgctctgaacggctgtttttttatgcctgaaaaacttgttcactcaataggccgatttactgcccaaccggtatccgggctgggtcattcacatgttctgcggcgtattttgtccttgcagatttttctcatccagatccatttctgcgccgcatttataatcaagcgccatcagtttacaatccttcacagatatacaaatgaatttttacaataaacataaaatatgtaatttctgacacaataatgccaatagccctaaaacatatgaaacatgaagagcgcgacctaagtgatgaagagccggtaacaggctccactccggcttttcatcatctctctttaagactgattttcggtgaaaccccatgttttattttatgaataaatatatctaattcgtttgtaaaatcgaacaataactcctccgaaagtattctatacacatttgttataatcatgctaggatgttagataaagggataatttgtaggatattgtatttctgttcaatatgatcggaggaatctcatgaacaatcttgcctttttatttcctggacaagggtctcaatttgtaggaatgggcaaacaattttggaatgattttgtgctcgcaaagagattgtttgaagaagcgagcgatgcgatctccttggatgtaaaaaaactgtgttttaacggagatatgaatgaattgacaaagacaatgaacgcgcagcccgctattttaacggtcagtgttattgcttttcaagtgtatatgcaggaaataggggtgaagccccgcttcctggcaggtcatagcttaggcgaatattcagcgcttgtctgtgccggcgccctttcttttcaggatgccgttacacttgtaaggcagcggggaattcttatgcaaaatgcggatcctcagcagcaggggacgatggccgccgtgactcacctctctcttcaaacgttgcaggaaatatgttcgaaagtgtcgacggaagactttccggcaggagtagcctgcatgaattcagaacagcagcatgtgatttccggacaccggcaagctgtggaacgtgtcatcaagatggcggaggaaaagggagcggcatacacttatttgaatgtcagtgcgccttttcacagttcgctgatacgatcagcatctgaacaattccagactgtattacaccggtattccttccgggatgccgcatggccgatcatttcaaatgtcaccgcacgcccttacagcagcggaaattcgatcagcgaacatctcaagcagcacatgacgatgccggtaagatggacggaatcgatgcattacttgcttttacacggagtcacagaagtcatcgaaatgggtccgaacaatgttttagccggtctgctgagaaaaacaacgaatcacattgtaccttatcccttaggacagacatctgatgttcacttgctttccaattcagcggaaagaaagaaacatattgtccgtttacgcaaaaaacaactgaataaattgatgattcaatccgtcattgcgcgaaattacaacaaggattcagcggcttattccaatatgacgacggcattatttacgcaaatccaagagctgaaagagagaatggaaagacatgaaaatgagctctcagaacaagagctcaaccattcgatccatttatgcaaattaatttgtgaagctaaacagcttccggcttgggaagaattgcggattttaaaataaagcgcccaggaggggacctatgtataccagtcaattccaaaccttagtagaagtcattcgggaaagaagcaatatctctgatcgcgggatccgttttatcgaatccgataaaaacgagacggttgtctcttatcgccaattgtttgaagaggcgcaagggtatcttggctatttacagcatctcggcattaagccgaagcaggaaattgtatttcaaatccaagaaaacaaatcatttgtcgttgctttttgggcttgtatattaggaggaatgatcccggtgccggtcagtatcggagaagatgatgaccataagctgaaggtctggcgcatttggaatatattaaatcatccgtttctgattgcctctgaaaaagtattggacaaaataaagaaatacgctgcagaacacgatttacaggatttccatcatcaattaaacgaaaaatctgacatcattcaagatcaaacctacgattaccccgcttcgttttatgaacctgatgcggatgaactcgcctttatccaattttcttcaggatcgacaggagatccaaaaggagtcatgttaacgcatcacaacttaatacataacacgtgcgccattgggaatgccctagccgttcattcgaaagactctttcttatcatggatgcctttaacgcatgatatggggctcatcgcctgccaccttgttcccttcataaccggaatcaatcaaaatctaatgcctacagaattatttattcgcagacctattctttggatgaaaaaagctcatgaacataaagccagtattctatcctctcctaatttcgggtacaactacttccttaaatttctgaaaaacgaaccagactgggatttatcccacatcaaggtcatcgcaaacggtgcagaaccgatattgccggagctctgtgacgaatttttgaaaagatgcgcagcattcaatctgaaaagatccgccattttgaatgtttacggtttagcggaagcttcggtcggcgcagcattctctaaattaggtaaagaattcgttcccgtttatttgcatcgtgactatttaaatcttggtgaaagagctgtaaacgtcagcaaagaggatcaaaattgcgcttcattcgtcgaagtgggacgacctattgactattgtcagcttcggatctccgatgaagcaaatgaaagagtagaagacggaatcatcggccatatccagatcaaaggagacaatgtgactcaagggtattataacaaccccgagagtacggaaaaagcgctgacttctgacggctgggtaaaaacgggagacctcggattcattagtgaaagtggtaacttagtcgtaacgggaagagaaaaggacattattttcgtgaacggaaaaaatatctacccgcacgatattgaacgggtcgcgattgaaatggaagaggttgacttaggaagggttgccgcctgcggtgtatatgatcaaaagacacaaagcggagaaatcgtgctctttgttgtttacaaaaaatcacctgaaaaattcgcaccgcttgtcaaagagataaaaaagcatttgctcaagcggggcggctggagcataaaagatgtccttccgatccgaaaactccctaaaacaaccagcggaaaggttaaacgctacgaacttgccagacagtatgaggcagggaatttttcaacagagtctgccgccatcaatgaatatttggagagcagcccggaaacgtccggacagactcccattcatgaaattgaaacggaattactgtctatcttttccgatgtgctcaatgggaaaaaggttcacctcgctgacagttattttgatatgggagcaaattcattacagttatcgcagattgccgagcgcatagaacagaaattcggacgcgagcttgccgtttcagatctctttacgtatccttctatcactgatttagcggcatatctgtctgaaagccgggctgaaatcaagcaggacgtggcagcgaaaccaagccacgtgacgccgaaagatatcgccattatcgggatgtcgctcaatgtccctggagcatcaactaaaaatgatttttggaatctgcttgaaaaaggtgagcacagcattcgagaataccctgcatcccggctgaaagatgcggcggattatttaaagtccatccaaagcgaaatcaatgagaatcagtttgtgaagggcggctatttagatgaaatcgaccgctttgattactcgttcttcggtttagctcctaaaacggctcagtttatggaccctaaccaaagactgtttttgcagtctgcatggcatgcgattgaagatgcgggctatgccggcggcagcatgaacgggagccgtgtcggggtatatgcagggtactcgaaggtgggctacgattatgaacgtctcctttctgcgaattatccggaggagcttcatcaatatatcgtgggcaatctcccttccgtgttagccagccgaatcgcttatttcttaaatttaaaagggccggcggtgacagtcgatacggcgtgctcctcatcgcttgccgccgttcatatggcatgtaaatctttaatatccggcgattgtgaaatggctcttgccggcggtatccggacatcgctcttgccgatctgtatcggacttgatatggaatcttcggacgggtacacgaaaacgttcagcaaagattcagacggtactggcacaggtgaaggcgcggccgcagtcctgctgaaacctctgcaggatgctgttcgcgacggagaccatatttacggcgtaatcaagggaagcgcgttgaatcaagacggaacaaccgccgggattacagcaccgaatccggcagctcagactgaggtcattgagacggcctggaaagacgcgggcattgcccctgaaacactgtctttcatcgaagcgcatggcaccggaacgaagctcggcgatccggttgaatttaacgggctttgtaaagcgtttgaaaagtatacggcaaaaaaacaattttgtgcgattggttctgttaaatcgaacatcggtcatttgtttgaagcggcaggcatcgtcgggctgatcaaatctgtcctcatgctgaatcacaagaaaaatccgccgttagtgcactttaatgaacctaatccgctcattcattttcactcttcaccattttacgtaaaccaggaagctgcagcgttcccatccggtgatgagccgctgcgaggcggagtcagctcatttggctttagcggaacgaacgctcatgtggtattggaagaatatatttctcaaagtgagtatgcgcccgaggatgaacatgggccgcacctatttgttttatccgctcatactgaaaaatcactctatgaactcgcacagcagtaccggcaatatgtatcggatgacagccaagcttcattaaagtccatttgctatacagccagtacgggcaggactcatttggatcatggcattgccatgattgtatccggtaaacaagaactatcggataagctgacccgcctgattcagggagacagaaaccttcccggtgtatacatcggctacaagaatatgaaggaaatgctgcccgctcataaagaagagctgaataaacaagcagccgcactgattaagcagcgtttacgtacgcaagatgaacggatcacatggctgcatcgcgccgccgaattatttgtgcaaggagccgttatcgattggcgcgcgctttattcaggtgaaactgtacaaaagacgccattgcccgtgtatccgtttgaacggagccgatgctgggctgaagctgaccaattgcgcttaaacgaggacgaaaagagaggagaagcggcattgaatatcaatcaatcgaagtcgcacattgaatccttcctgaaaactgtaatcagcaatgcttcggggatcagagcggaggaactcgatctgaatgctcattttatcgggctcggaatggattctatcatgctgtcacaggtcaaaaaagccatcgcggacgaatttggggcagacatcccaatggatcgtttttttgatacgatgaacaaccttcaaagtgtcatagattacttggctgagaccgttccatcgtcctttgcatccgctccgcctcaagagaatgttccggcgcaggaaatacaggtcatttcagaagcacagtctgaatcggatcgcagagaaggtcaacaagagcatatgcttgaaaaaataatcgcttctcagaatcaattaattcaggataccttgcaagctcaattaaatagctttaatttgttgagaaacagcggacatcattccgatgagaaagaatacgctaaagcgcaagagaaatcaattccttctgtcaagcaggggcctccggccgtcactgcagaaaagaaagcggctcaagaagcgaaaccctatgttcctttccagcctcagaacctgcatgaacagggacactataccgcacggcaaaaacaatacttagaagatttcatcaagaaatacgcagataaaacgaaaggttccaaacaatatacggacaacacccgatttgctcatgcaaacaaccgcaacttgtccagcttccgttcgtattggaaggaaatcgtatacccgattatcgccgaacgttctgacggttctaaaatgtgggatattgacggaaatgaatatatcgatgtcaccatgggattcggggttaaccttttcgggcatcatccttcctttattacacaggttatcgatgattcagcccgttcatcattgcctccgctcggcccgatgtcagatgtcgccggtgaagttgccgaccggatccgcacatgtaccggagtggaaagggtcgctttctataattccggaacagaggccgtcatggttgccctgcgtttggcgcgggcagcaacaggaagaaagaaagtcgtggcgttctcgggatcttatcacggcacgtttgacggcgtattaggggttgccggcacaaaaggcggagccgcgtctgcgaatccgctggctccgggtatactgcaaagctttatggatgatttgattattttacattataacaatcccgattcgctggacgtgatccgcagtcttggtgatgaattggcagccgtactggtggaaccggtacaaagccgcagaccggatttgcagccgcgggcatttttgaaagaattgcgggcgatcacgcagcaatccggaacagctctgattatggatgaaattattaccggatttcggatcggtctcggcggcgcacaggaatggttcggcattcaggctgatttagtgacctacggaaaaatcatcggcggcggacagccgttaggggtagttgccggaaaagctgagttcatgaatgcgatcgacgggggtacctggcagtatggggacgattcctatccgcaagatgaggcgaaacgcacgtttgtggccggcaccttcaatactcacccgcttaccatgagaatgtcgttagccgtgcttcgccatttacaaaccgagggagaacacctgtatgaacagctgaatcaaaaaacagcctccctggttgatcggctgaatcgcttctttgaacaatcgcaagtgcctatccgcatggttcaattcggttctttattccggtttgtctcatcgcttgataacgacttgttcttttaccatctcaattataaagggatctatgtgtgggaaggacgcaactgcttcctatccacggcgcataccgcggatgatattgaacacatcattcaagctgttaaagacacggtgaaggatcttcgccgaggcggatttattccggaaggcccggattcccctgatgacggcggacataacaaatcaggggcgtacgagctttcagatgaacaaaaacaattggttatggcatcccattacgggaatgaagcgtccgccgctttaaaccagtccattatgctgaaagtggagggcgaactgcagcatacaccattaaaacaagccgtccggcatatcgttggccgtcatgaagctttacgtacagtgattcatcccgatgacgaggtacagcaagtgcagaaacggatgaatatagaaataccagtcattgattttactgttcacccgcatgaacatcggcagtcggaaattcaaaaatggctgacagaagatgccaagcggccgttccatttccatgaacaaaagcctttgtttagaatccatgtgcttacatcggctcacaatgaacatctgattgtgctcacgttccatcatatcattgtcgatggatggtcaatcgccgtatttgttcaagaactggagagcaactacgcggcaatcgtacaaggaaaaccgatttcaccgaaagaggcagatgtttcgtttcgccaatacttagactggcagcaggcacagattgacagcggccattatgaagaaggggtccgttattggcggcgtcatttctctgaaccgattcagcagccaattctgccgagcacaggttctgtccgttatccgaacgggtatgagggagaccggtgtaccgtcaggcttggacggccattgagcgaggctttaaggtcattaagcattcagatgaaaaatagcgtatttgtgacaatgctgggtgcatttcatctttttctgcaccggcttaccaaacagtcaggccttgtgatcgggatccccgcagcaggtcaatcgcatataaaacagcatgatctgattggaaattgcgtcaatatgattccggtgaagaacacgtctacttcagaaagcactttaaccggttatcttggcagtatgaaagaaagcgtgaatcttgcaatgcggcaccaagccgtcccgataacactggtggccagagagcttccgcacgatcaagtgccggatatgcgtattatctttaatttagacaggccttttcgaaagctgcatttcggaaaggcggaagcggagcccgttgcatacccggtaaaatgcaccctgtacgatttatttcttaacataacagacgcgcatcaagaatatattcttgatttcgactttaatacgaacgtcatcagtccggaaatcatgaaaaagtggggagcgggttttacaaaattgctgcaaaaaatggttgagggagattcaatccctcttgacgccatgatgctgttttccgatgaagaacagcatgatttacaagcactttatgccgaacaccagaagcgggtctcttcaataggaagcaatacagcaaatttcactgaagcctacgaggcgccgataaatgaaacggagcggcagctggcgcggatttgggaggaacttttcggccttgaacgggtcggcagatcagatcgcttcctggctctgggaggaaactcgctccaggcgacgcttatgctttccaaagttcagaagacatttcatcaaaaggtttccatcggacaatttttcaatcaccagactgttaaggaattagcacatttcattcagaacgaaacaaaagtcgtgcacctcccgatgaaggctgccgagaaaaaagcgtattacccgacatcgccggcgcagcaaagagtatatttcctgcaccaactggaaccggatcagctggcgcaaaatatgttcggccaaatatcaataacagggaagtacgatgagcaagccctgatctcatctcttcaacaagtgatgcagcggcacgaagcgtttcgcacgtatttcgacattatagatggcgatatcgttcagaaacttgaaaacgaagttgattttaacgttcatgtccggacaatgagccgggacgaatttgatgcctattcagaccggtttgtaaaaccgttccgcctggaccaagctccgttagttcgtgcggagctgatcaagattgaaaacgagcaggccgaactgctcatcgatatgcatcatatcatttcggatggttattccgtcaacatccttacaaatgaattgctggctttatatcatcagaaaccattaccggacattgaatttgaatataaagatttcgcagaatggcaaaaccaacggctgaatgaggatgccatgaagcggcaggagacatattggctggaacaatttcaagacgaaattcccatccttaacctgccgacagacggttcaaaagcggcagaacggtcttctgagggacagcgagtgacatgctccttacagccggatgtcatccgttcgcttcaagatttggcgcaaaaggcggaaaccactctctatacagtgctcctggccgcctataatgtgctgcttcataaatataccggacaagaagacattgtcgtaggcacgcctgcttcaggaagaaatcatccggatatcgaaaagatcatcggtattttcatacaaaccatcggaatccggacgaagccgcacgccaatagaacgttcacggattatctggaagaagtaaagcggcagacgcttgacgctttcgaaaaccaagactatccatttgaccggcttgtggagaaattaaatgtgcagcgggaaacaaccggaaagtctctgtttaacacgatgtttgtgtttcaaaacattgaatttcatgaaatccggcacaatgaatgtacatttaaagtgaaagaacgaaatccaggggtctctttgtatgatttgatgctcacgatcgaagatgccggtcaacagatagagatgcattttgattataaaccgggacgattcacaaaagacaccattgaacagatcaccagacactataccggcatcttaaacagtcttgttgagcagccggagatgacattgtcttccgttcctatgctgtctgaaaccgaacggcatcaactgctgacggagtgtaacggcacaaagacgccgtatccgcataacgaaacagtaacccgatggtttgaaatgcaggcggaacagagtcccgatcaggaagccgttatttttggcaatgagcggtatacgtacagacagctcaatgaacgggcgaaccgattggcgcggacgttacggacaaaaggcgtacaagcggatcaattcgttgccatcatctgcccgcatcggatcgaactgattgtcggaattttggctgttctgaaagccggcggcgcatacgtgcccattgatcctgaatatccggaagatcggatccaatatatgctgagagattcaagggcggaggttgtgttgacacagcgcagcctgctggatcaattaccgtatgatggtgacgttgtgcttttggatgaggaaaactcataccatgaggatcactcgaatcttgaatcggacagcgatgcgcatgatttggcctacatgatctatacgtcaggttccacgggaaatccaaaaggtgtcctcattgagcatcagggactggctgattatatttggtgggcgaaagaggtttatgtaagaggtgagaaaaccaacttcccattatactcttccatctctttcgatctgactgtgacctcgatatttacaccgctggttacgggaaataccatcattgtctttgacggcgaagacaaaagcgctgtgctttctgagattatgcgggactcaagaatagacatgatcaaattgaccccggcacatctgcacgtcatcaagaagatgaatatcggtggcggcaccgcaatacggaaaatgattgtcggcggagaaaatttaagcacccgtctggccaaaagtgtcagcgagcagtttaaaggccggctggacatttttaatgaatacggaccgacggaagctgtcgtcggatgtatgatttatcacttcgacgcagaacgggacaagcgggaatttgtaccgatcggcactccggctgccaatacggatatttatgtggccgatgcaagcagaaatctggttccgatcggggtaatcggcgaaatatatatcagcggaccgggtgttgccagagggtattggaaccgtccggatttaacggcagagaaatttgttgaaaacccgtatgtcccgggagcgaagatgtacaaatcaggggatttggctaagcggttgaaggacggaaatcttgtatatatcgggcgcattgatgaacaagtcaaaatcaggggacaccgaatcgagcttggtgaaattgaagcagcaatgcataacgcggaagcggtgcaaaaagccgcggttacagtgaaagaagaagaagacggcttaaaacaattatgcgcgtattacgtaagcgacaagcctatagcggctgcgcagcttagggaacaattgtcatcggagcttccggactacatgattccgtcctattttgtccaactggagcatatgccgttaacgtccaacgggaaaataaaccgtaaggcactgccagcaccagaagcgagtctgcagctgacagctgaatatgttccgccgggtaatgagacggagtccaaactgacagatttatggaaggaagtgctcggaataagccatgcggggatcaaacataatttctttgatctcggaggcaactccatccgagcggctgccttagccgccagaattcacaaagagctggatgtgaatctgtctctaaaagacatattcaagtttcctaccattgaacaattggctgacaaggcgttacacatggacaaaaaccgatatgtaccgattccggctgcaaaggaaatgccatattatccggtttcttcagctcagaggcgtatgtatttgttaagtcacacagaaggcggcgagctgacttacaatatgacgggtgccatgaatgtggaagggacgatcgatcccgaacggttaaacgccgctttccgaaaattaatcgcgcgtcatgaagcgttgcggaccagctttgatttatatgaaggcgagccggcacagcgtattcatcagaacgtcgactttacgatagaacggattcaagcaagcgaagaagtagcggaagaccgtgtgcttgatttcatcaaagcgtttgacttagccaaaccgccgctgatgcgggccggactgattgaaattgaacctgcacggcacgtgcttgtggttgatatgcatcatatcatttctgacggcgtgtccgtcaatattctgatgaaagatttaagccgaatctacgaggggaacgaaccggacccgctctctattcaatataaagactttgcagtttggcagcaatcggacattcagaaacggaacatcaagagccaggaagcgtattggctggatcagtttcacagtgatattcctgtactggatatgcctgcggattatgagagacctgccatacgcgattacgaaggcgaatcatttgaatttcttatacccgaacacttgaaacagcgtttaagccaaatggaagaagacacaggagcaacactgtatatgattttattggcggcctatacgattcttttatccaagtacagcggacaagaagatattatcgtaggaacgccatctgccgggcggactcatttggatgtagagccggtcgtgggaatgttcgtcaatacgttagtcattcgcaatcacccggcgggccgtaaaacatttgatgcctacttaaacgaagtaaaagaaaacatgctgaacgcctataaaaatcaagactatccattggaagaattaattcagcatctgcatcttccaaaagattcaagccgcaatcctttattcgatacgatgtttgtgctgcaaaatctcgatcatgctgaattgactttcgattctcttcaactcaagccgtattcatttcatcatccggttgccaaattcgatttgaccttgtcgattcaggcggaccaagacaactatcacggactgtttgaatattcgaaaaaactgtttaagaaaagcagaatcgaggttttatcaaacgactacttacacattctatcggcgattttggaacagccaagcattctaattgaacatatcggattgagcggcagcaatgaggaagaagagaacgcgcttgattctattcaattgaacttttagggaaaagcattatttctttaaattatataaaatgaggtgctccaatgtcggtatttaaaaaccaagaaacgtactgggaaaacctgtttgatgaagaagacggattaagcgcattcccttactttaaagcagcggataaagcgtcgtttgcccgtaccggctaccaggaaaaatgcatctgccgttccttatctccggaagtatctcaaagaatcatgacaatggcgaatcattccgatatggcggcctatctgattttattggcgggtattgaatgcttgttatataaatatacggatcaaacgagcctgattcttggcattccgacggtatcgaagcaaaaagccggccagtcagccgttaacaacattgtcctcttaaaaaatacgctttcaaacgagagtacatttaaaaccgtattcgggcagctgaaagaagccgttaatgattctctgaaaaatcaaaacctgccgtttagaaaaatggttcagcatctgagcgtgcaatacaatgacgagcatctgccgttgattcataccgtcgtttcgcttaacgaaattcattccttgcaatttaaagaagatactgcagccgatacgctgtttcactttgatttggagaacaacgggattcatttgaagcttttttataacggcaatctgtacgatgagcgctatatcaatcaaattgtgtcccatttggatcagctgctgtctgtgattctgtttcagcctcaagccgcgatccatacggcagagatcttaccggaagcggaaaaacagaagctattgtttgattttaacgacaccgtcagagatttctccgggagcagaacagtctatcaattatttgaagagcaagcagaaagaacgcctgagcatgcggccgtcaagtttaaaaacgaccatttgacgtacagggaactgaatgagaaggcgaaccgtttggcaagaacattgcgtaattgcggggttcaacccgatacgttagtcgccattctcgctgatcgttcattagagatgatcgtatccattatagccgtttggaaggcagggggcgcttatgtgcccctggatcctgaatatccaaaagagcggcttcaatatttgcttcatgatgcggatgcagacgttctccttgttcagcgtcatttaaaaaacagtctcacctttgacggcccggtgattgatttgaatgatgaaacatcataccatgccgatagctcattgttatcaccagcaacgggacacagccatttagcctatgtcatttatacgtcgggtacaacaggaaagccgaaaggagtcatggttgaacacggcggcattgtgaattcgctccaatggaagaaggcgttttttaagcattctccggcggatcgcgtgcttgtcttgtacccgtatgtttttgatgcgttcattttaaatttcttcggcccgctcatctcgggggcaactttgcacctattgcctaatgaagagaataaagaaactttcgccattcaaaatgccataaaacaagagagaattactcatttctcaacttctccccgtcttctgaaaacgatgatcgaacagatgaacacagaggacttcatccatgttcagcatgttgttgtaggcggtgagcagctggaaacagatacagttgagaagctgcattctctgcagcctcgcattcggatcaataatgaatacggaccgacagaaaacagcgtggtatctacatttcaccctgttcagtccgctgatgaacagatcacaatcggcagcccggtggccaaccatcaagcttatattttaggagcgcaccatcaaatccagccgatcggcgtaccgggagagctgtatgtcggaggagcgggagtggcccgcggctacctcaatcgtcctgaattgacggaggaaaaatttgtggagcatctgcatgtccctggtcaaaagatgtataaaacgggtgatctcgccagatggctgccggatggaagaatcgaatatttagggcggattgatcatcaagtgaaaattcgcggctaccggattgagatcggcgaggtagaggcagccatgttcaatctggaaaacgttcgtgaagccgcagtcgtcgcgcgggaagacgcagacggggccaaacaattgtatgcctattatgtcggcgggccttctttgaccgctgcgcagttcagaaaagaattatcccgggaactgccgaattatatgattccctcccgctttatcccattggaacgcattccgctcacttccaatgggaagattgatctgaaagctttgcctgctgctgacgaaaatacgcgggcggaatacgaatacatagccccgcggaacacaatagaagaactgctggcgtctatctggcaagaagtattaggggcagaacgtataggaattctggataatttctttgattttggcggagattcgattaagtcaattcaggtgtcatccagattgtatcaagccggatacaaggttgatatgaagcatttgtttaaacacccctcgattgctgaacttagtcagtttgtagcgccggtcagcagggtggctgatcaaggagaagtgaatggcggaaccaagctgaccccgattcagcattggttttttgaacaaaacatgccgcatgcacaccattacaatcaggccgtcatgttatattcggcggaaagctttaaagaggctccgcttcgccggacgatggaacagatcgcgtcgcatcacgatgccttgaggatgatttttgaaaaaacgccggatggatacgctccgcgaattacaggaacagatgaaagtgaactataccatctggaagtgatgaattataaaggggaaaccgatccggctcaagcgattgccgataaagcgaatgagattcaaagcagcatggtattagacaaagggccattgatgaagctcggtttgttccaatgtccggacggagatcatttgctgattgcaattcatcatttgctgattgacggagtatcctggcgtattttgctcgaagattttgcaagcggttatgagcaggcagaacgcggacaaacgatccagctcccgcaaaaaacagattcgtttccattctgggccgatcaattgtccaaatatgcggcggaaaccgacatgaaagaggagattgcttattggactgagctttcaagcataaagcctcagccattgcctaaggacactatcagcgaaggatcgttattaagtgacagcgaagaagtgacgattcaatggacaaaagaggaaacggagcaattattaaaacaagcgaaccgcgcctacaacacggatatcaacgatctgctgctgacttcgttagggctggctgttcacaagtggacaggcacggaagacattgtcgtgaatttggaaggccacgggagagaaccgattattccggatgctgacatttcccgcacgataggatggttcacaagccagtaccctgtcgtcctgaggatggaagccggaaaagacctgtcgcagcggatcaagatcgtaaaagaagggctgcgccgcatccctgataaaggaatgaattacagcatcatcaaatatatatccgggcatccggaagccgacagcatgcagctgaatccggagatatcgtttaactatttgggacaatttgaccaagacctgaagcatcaggctttgcgcatatcgccatattccacagggttatcgatgaacgaaaaccaagagagaacggccgtgcttgatttgaacggcatgattgccgaagggacattatcactgacactgagctacagcagcaaacaatacgaaagatctactatggcgcaatttgcccaagggttgaaagaaagtctgcaagaagtcattgcgcattgcgtaagccggcagcagacttctctcacaccaagtgacatcctgttaaaagatatctcaatcgacgaactggaacagcttttggagcagacgcgtgaattaggcgaagcggaaaatatttatccattaacgccgatgcagaagggcatgctgtttcacagcttatttgatccgaattcaggtgcttattttcagcaaacgatgtttgatctgcatggagatctggagattgattcattttcaaaaagcttggacggcttatcgcaaaaatatgatattttccgcacgaatttttacagaggctggaaggatcagccgctccaaattatattcaaaacgaaaaaaatcggttttcaattcaatgacatacgagagatgaaggaatcacaaaaagaagcgatgattcagcagtatgccagagaagataagatgcgggggttcgacttagaaaaaggcgcgttaatgcggctattcatccttcgtacggatgaaaagacataccgttttatctggagcttccaccatattttgatggacggctggtgcctgccgctgattacaaaagaaatattcgagaattactttgccttgcttcagcaaaagcagcctgaacaatcatcaattactccgtacagtcaatatattgaatggctcggccggcaagatgcgaaaaaggccacggcttattgggatcaatacttggagggatatgaggagcaaaccggccttcctaaggatcaccatgcagcggaagacggacgatacgttcctgaaaaagtgacgtgtgacataagctccgatctcacttcgaaaatgaagcggacggcaggccagcatcatgtcacgctgaacacgctgctgcagacggcatgggcggttttgctgcagaaatataaccgcagccgggacgttgtgtttggaagtgttgtatccggaagacctgctggaattccaaacgtggaaaccatgatcggcttattcattaacaccattcccgtccggttccggtgtgaagccggaacaacgtttgccgagcttatgaaagaggcgcaagaaagggctgtagcgtctcaacaatttgagacgcacccgctgtacgatattcaagcgcgcacaacgcaaaaacaagatttaattacacatttaatgatattcgaaaattatccggttgatcagtatatggaaagtataggccgccagaacggaacatccatcacgatctccaacgtgcaaatggaagaacagaccaactacgattttaatttgaccgttataccgggcgacgagatgaccatctcttttgaatacaatgcaaatgtgtatgatcgggcaagcatagagcgggttcgggaacatttcatgcaaatcctgcaacaagtcgtgacaaatgcggatatccgggtggatcaagcggaattgttaacggaaggcgaaagaagaacccttctgcagacgcttaacgacacggccgcgccgtttccgcagacgccggttcatcaattatttgaagagcaatcgcagcgtacgcccgatcaagcagccgtcattgataaggacaggcagctcacgtacggagagctcaataagcgggccaaccgactcgcgcgaacgttaagagcgaaaggagtccagacggatcagcctgtagccatcatcacgagaaacagcatcgaatcggtggtcggaatccttgccgttttaaaatcagggggagcctatgtccctatagatccggaatatccgcaagaccgcatacggtatatgctggatgactcccaagccggaatcgttttaatgcagcgggacgtcaggaaacagcttgcctatgaaggcgtcacggttttacttgatgatgaaagttcttatcaccaagatggctctgaccttgctcagataaatgatgtgagccatttggcatatgtcatttatacgtcaggttccacaggccggccgaaaggcgtactaatcgagcaccaaggcttgaccaattatatttggtgggcgaaagaggtttatgtaaaaggcgagaaagccaacttcccattgtattcgtcaatttcttttgatctgacggtgacttctattttcacgccgcttgtcacaggaaatgcaatcatcgtctatgacggagaagataaaacagctctgcttgaatcgattgtgcgagacccgagggtggatatcattaaattgactccggcccatttgcaggttttgaaagaaatgaacattgccgatcaaacggctgtccgaagaatgattgtgggcggggaaaacttaagcacccggttagcccgcagcattcatgaacagttcgaaggccgggttgaaatatgcaatgagtacggaccgacggaaaccgttgtcggctgcatgatttaccgttatgatgccgtaaaggacagacgggaatcggtaccgatcggaaccgctgcggcaaacacgagcatttacgttcttgatgagaatatgaaacccgcgccgatcggagtgccgggagaaatctatatcagcggcgccggtgtggcaagaggatatttgaaccgtcccgaattaacggcagagaaatttgtcgatgacccgtttgaacccggagcgaagatgtataagaccggagatttggcgaagtggctggcggacggaaacattgaatatgcgggcagaatagatgaacaagtgaaaatcagaggttatcgtatcgaattaggcgagatcgaggcggcactgcttcaagaagaagcgatcaaggaagctgtcgttacagccagagaggatgtccacgggtttaaacaattgtgtgcatattacgtaagcggcgggcaaacaacggctgcccggctccggaaacaattgtctcatacccttgcaagttatatggttccggcttattttatcgagcttgatgaaatgcctttaacttctaacggaaaaataaacaaaaaagggctgccggctccggatttcgagctgcaggacagagcagagtataaagctccccgaacaaaagcggaagaaatattagtttctgcctgggaatcggtattaggcgctgaaaacgtcagtattcttgataatttctttgaccttggcggagattccattaaatccattcaagtatcctccagattaaatcagcaaggatacaaaatggaaatcaaagacttgtttcaatatgcaacaattgcagaattgagtccgcatatcaagcagaatctgcgtatagccgatcaaggtgaggtcaaaggaaaagtcagcctgactcctattcagcattggtttttcgaacaaataacgacagatcagcattattataatcaagccgtcatgctgcatgcgccggaaggttttcaggaaacgcagcttcgtcaaaccctgcaaaaacttgctgaacatcacgatgcgctccgcatgacgttccggactacggaaaatggctgcgaggcacagaatgaagaaatcgcccaaagcggactgtaccgcttagaagtcctgaatctgaaagaagattccgatccgggacggacaattgaagccaaagctgatgagatacaaagcagtatgcgtttaagtgatgggccgttaatgaaagccgggttgtttcaatgcgcaaatggagatcatctgctcatcgccatccatcatttgattatagacgggatttcatggcgcattttactggaagatatcgttagcggctacaagcaagccgagaatgggcgagtgattcaactgccgcaaaaaacagactctttccaattatgggctaagagactttcagaatatgcgaaaagtgaaaccataaaacaggaacaggaatattggacaaagatcgaacaaaccgaagtcaaaccgctgcctaaagattttcatgaaacccatacaactgcaaaagacagtgaaacagcaactgtggaatggacgaaagaggaaacggagctgctattaaaacaagcgaatcgcgcttataacacggagataaacgatttgcttttaacttctctcggtctttccatatcgcattggtcaggactgaaacaaattccgattcatttagagggacacggccgagaacagattatacaagatatagatatctcccgcacggtcggatggtttacaagtctgtatccggttgtgctgcacgcgcagccgggcaaagagatctctgattatatcaagacgaccaaagaaggattgcgccaaattccgcataaagggatcggatatggaatagcaaggtacttaagcggcggaatgccatcgaaactcaatcctgagatcagctttaactacctgggacagtttgaccaagatttacagcagcatggggttcaattatcttcttattcttgcggttcagactctagcggaaatcaagaaagaccgtatgtattgaatataaacggaatgatcaccgacggccggctgaagcttacgatcagctacagcagcaaacagtacgcaaaagaaacgatcatgcggttatcggaaacgattcaaagccgcctgcggacaatcattacgcattgcgtccatagagaacaatcggaactgacgccaagcgatattttgttaaaaggcatgtccattgacgaattggatcagctcctcattcaactgccgcatgcaggtgaggttgaaaacgtgtatccgctcactccgatgcagaaaggaatgctcttccacagcctgctggacgaggcctcaagttcttattttgaacaagcatcgttcgatttgcagggagaattaaagattgattggtttaaagcaagccttgaacgattatttgaaacatacgccgtgctcagaacccgtttttacagcggctggaacgatactcctttacaaattgtctataaaacgcaaacaccgcaaattcattttgcagatttgcgtgatatagaggagcacctgagagaggatgcaatcgcagcctatcaaagagaagataaggcaaaaggatttgacttggctcgggatccgctgatgcgcatagcgattttccgtatggaagaccgcaaatatcatttgatttggagcttccatcatattgtgatggatggctggtgcctgtctcttatcacgaaggaagtgtttgatcattatcgcgccttacaagaaggcagggaaccagaaccgtcatcggcagctccttacagcaactatatcgagtggcttgaccgccaagatcagggagcggcaaagcggtactggagcgggtatctcgaaggatataaaggtgaaaccacgcttcttcataaaatagagcagcatgaacaaaaagaatacgcctatgccaatgtgacctgccgatttgatcacgaacagacaaaacaattacagcagatcgcaaatcagcatcaggttacattaaatacgttgatccaaacgttatggggagttttattacagaaatacagcgggtccgcagacgttgtcttcggcagtgtcgtgtcgggaagaccggcggaaattcctgatgtggaacagatgatcggcctgttcatcaataccattccggttcgcatccgctgcgatgaggacagcacttttgctgatacggtgcaaatggttcaacaaaacgctctggcttcccaatcatacgatacctatcctttatacgaaattcaggcccaaacggaacaaaagcagaacctgattgaccatatcatgatttttgaaaactatccgatcggtcagcaggtcgaagagacgggacatcatagtacggagctgaacattacgaattttcatatgctggaacactcccactatgatttgaatgtagttgtcatacctggcaaacagctggccgttcatttcggttttaatgaaaacgaatatgaaaaatcagaagtggagcggatctgcggacattttgaacagctcatgcagcaagtattacagcagccgtctgtcaaaatagaagaattggagcttctctctaggcaagaaaaagaacatttgctcagccgctttcagtctaatgacatgcattacccgcttgaacaaacgatacatgagctgtttgaggaacaggcgcatcgtactccggacaatacagcggttgtattcgagggtaaacaactcacctacggagaactgaaccggcgtgccaatcagcttgcgcgaaccttgcaggcaaaaggtgtgcggaacgataagcttgtcggtattatgactgaacgctcgcttgagatgattgtaggcatcttgggagttttaaaagcgggcggcgcatatttgccgatagatcctgattctccgtctgaacgcatcagttatattttaaatgattcaagcatcagcgtattgctttaccgcgggaagctgcaggatgacatcggcttctcaggaacatgtatcgatctcatggaggaacatttctatcaccaaaaagacagcagtcttgcactctcttatcagtccagtcaactggcctatgccatttatacttccggtacgacaggcaatcctaaaggcacgttaattgaacatcgccaggtcattcacctgattgaaggacttcgacgccaaatttactctgcctacgatgcggagctgaatgtagccatgctcgctccatattatttcgatgcttctgttcagcaaatgtatgcttccttgctgtcaggacataccttgtttattgttccgaaagagattgtgtcagacggtgctgccttatgccgttattatcggcagcattcgattgacatcaccgacggaacacctgcccacttaaagcttttgatagctgcaggtgatttgcagggagttccgcttcagcatcttttaatcggaggagaggcactttccaaaacgacggtaaataagctcatgcaattattcggcgatcatggcgcttcacctgggattaccaatgtatatgggcctacggagacttgcgtagacgcgtctctgttcaacattgaatgttcttccaatgcgtgggcacgcagccaaaactatgtccctataggcaagccgttaggcagaaaccgcatgtacattcttgattcaaaaaaacggctgcagccggcgggcgtccaaggcgagctgtatattgcaggggacggcgtcgggcggggttacttgaacctgccggaactgacggacgaaaaatttgttgccgatccgtttgtaccggaggaccgaatgtacagaaccggtgatctggcccgccttctgccggatggaaatattgaatatatcggccggattgatcatcaggtgaaaattcaaggttttcggattgaactcggtgaaatcgaatcggtgatgctgaacgttcctgatattcaagaagccgccgcagctgcccttaaagatgcagatgatgaatattacttgtgcggatactttgctgcggataagacaatacagatcagtgaacttcgcgaaagaatggcccggcatttaccgggatatatgatcccggctcaatttgtgcagctggataagatgccgctgacgccaaacgggaagttgaatcgccagttattgccggctccggtcaaaaagcgtgacggcggcatagagtacgtcccgccgcaaacttcggaagaaatccagctgacagcaatttgggaagatgtcctcgggttagagcaggtggggatcagagatcacttttttgagatcggcggacactccctgcgggcaacggcgctgattgcaaaaatacaaaagcaattgcatgtccaaattcctttgcgggacgtcttccgtctcccaaccattgaacagctcgcacagacgatcacgaagacggagctgaccggatatgctgcgattcctgcaattgaaaaaagaccttattatccggtatcctcagcacaaaaacggttgtacatcctgaatcacttggaaggcggagaactcagttacaacatgctgggactgatggctgtcgaaggcaagcttgaccgtgacaagctgcagcaagccttccgcacgctgattttgcgccatgaatctttgcgcaccggttttaaaatggctgacggagaacccgttcagtatgtcttagatcacgcaaagttcgaagcagagtggtatcaggcagaagaaaatgatgcggacctttatatccgcaaatttattcgtccatttcatctggatgagccgccgctgcttcgcgtggggctgattgaacttcaacctgaccgcggaattctgatgtttgatatgcaccatattatttctgacggaacatccatgagtgtattgattaaagaatttatccgcatttatgaaggagaaacattaccgcctttgcgcatccagtataaggactacgcagtatggcagaccggcgaagcgcggttaaaacagatccaaaatcaagaagcctattggttagagctgtacagcggcgacgttcctgtccttcatctgccgaccgattatatccggccgtcggcacgggattttgcgggagccacaatgcagtttacgcttgataagcaaaaaagcgccgggttaaagcagctggcatcccaaactgaatcgactttatatatggtgctccttgcgtcttatacattattgctttcaaaatacagcggccaggaagacataattgtcggcagtcctatagcgggaagaccgcacgccgatttggaaccgattatcggaatgtttgtgaatacattggccatgagaaattaccctgaaaaagggaagacgttctctcagtatctgtccgaggtgaaggagaatgcattaaaagcttatgagcatcaagattatccgttcgaagcgctgatcgatcaactgaatatcgcaagagacttaagccgtaatccattgtttgacaccatgtttgtgcttcaaaacacggagcaggaacagttagagataaatgacgtcactttcaaaccatatccaagcgaacatacgatggctaaatttgatttaaccttaacggctgtggaagaagagtcgggtattcagttcacaatggaatacttgacggctctgtttaaaccggaaacgatcgaacgcatgatggggcattttgtgcagctgattgattcgattattaaacagcctgatgccgagctggctcgtctgaatatgatgaccaaggaagaggaaggagacattcagcaactctttaacgatactgcagttgcggaaaaacgaattccgacaacgattcatcagctttttgagcagcaggctgagcttaacccggatcatgaagccgtcatgtttggaattcagacactgacttatcgtcagctgaatgagcgttccaatcagctggcgcgcatccttcaagataagggggcctgcactgatcaggttgttgccgttctcacggatcgctcagcacatatgatcatcggcattttagccatattaaaggccggcgcagcatttcttcctattgatccggagcttcccgaaaaacggcgggcttttatgctgaaagacagcggcgccggtgtgcttttgacttgtgcaggccacgctattccgccgcgctttgaaggagaagtgcttcagcttgatgatccgatgatatatcaaggcagagcagacaatcttaatctttcctgctcggaaaatgatttaatgtatgttatttacacgtcaggcacaacggggcagccgaaaggagttcagctggagcacaagacgatgacgaatctgctcgcttatgagcaggatcatacgcagcttcgctttgacagagtgctgcaatttgccgcgatgagctttgatgtctgctatcaagaaatgttctccgcgctttcaagcggaggaacactctttatcatcggcaatgaggcaaaacgtgacatacgtcagctcaatgattttgtcagaacgcacgggatacaaacagcattcctcccgacagcgttccttaagctccttgcctcagagaaacaatatttcgaaccgtttgccgcgtgcgtggatcacatcatcgctgcgggagaacagctcatcgtaacaagtatgctgcgtgacatgctggcacgccatcaagtcacattgcataatcattatggcccgtcggagacgcatgttgtgaccatgtataccgtcgatcctgatacagatcaggagcttcagccgatcggcaaaccgatttcaaatacggagattttcattttgaatgaagccggaacgcttcagcctgtcggaatcgtcggtgaactttgtatttcaggagcgagccttgccagaggctatcataacagggagcctttgacactcgaaacttttgttccgcacccatatgactcgaatcagcggatgtataaaacaggcgatctggcccgttaccttcctgacggaaacattgaatatgcgggaaggagagaccaccaggtcaaaatccgcggttaccggattgaactcggtgaggtggaggccgctcttctcaagcacgtacaggaagcagttgtcctatcaaaagaaaataccgatggccaaatcgatttatatgcctattttacagcggagcaatcactctcgatcagtcagctgaaagaaaaacttgctggccaaataccgggatacatgatcccttcatacttcatccagcttgagaaactgccgctaaccggcaatggaaaagtaaatcgaagagcattaccgatgcctgaagcaggtttacaaacgggaaccgactacgttgctccgcggacgaatatggaagagcagctgatatgcatctggcaagacgttttgaaggtaaaagaaataggtgtaaaagataactttttcgatttgggcggccactcgttgcgggggatgacgctcatcgccaaaattcataagcaattcagcaaaaacatttcattaagagaggtctttcaatgtccgacagttgaggaaatggcaaaggcaattgcaggagctgaaaccaacgggccggattacattccgaaagccaaagcaaaagatgtctatcctgtatcttccgtgcagaagatggtttacctgtcaacacaaatagaaggcggagaactgagctacaatatgccgggaatccttacattagaaggaaaactcgacataaatcgcttgcaaaccgctttccaaagactgatccagcgtcatgaatcactgcgtaccggttttgagctggtccgcggagaaccggtgcaggtgatcaaaccgcaagcggagttttcgatggaaagatacaaggcaacagctgacgaggttgaggaatgtttccgcaccttcgtgcggccgttcgatctcagccaggctccattactcagggccggactcatcgagttagaacaagacctgcatattttcatgtttgacatgcaccacatcatcacggacggcgcctccatgaatatttttgtcgaagaactgattcaattgtatgacggcaaagagttagctccgctccgtattcagtacaaagactttacggaatggaaacatcaaaaagagcaaagagaacgaatcaagaagcaggaagggtattggcttggtgtatttcatgaagagctgccttcatttgagctgccgaaagattttgcgagaccgccggttagaagctttgatgggaaaaggcacaattttacgctcgataagactgtcacccaagggataaagcagctggaagaattgaccgggacgacagcttacatgattttgttctcggcctattccatactgctggctaaatacagcggtcagggtgatatcgtcgtcggcacacctattgcggggagaccgcatgcggatttggaacccattatcggaatgtttgtcaatacattagccatccgcaccgctccgatggcggaaaagacatttttggattatataacggaaacgaaagaaaccatgctgaaggcttttgaacatcaagagtatccttttgaagaattagttgaaaaactgggtgtaaaacgggacttaagccgcaatccattgtttgatacgatgtttgtcctgcaaaatacggaacaaacggatattgaagtggactctctcgcagtcaggccttatgaacaaacagagacggcagccaagtttgatttacagctgaacttcttaatagatcaagatgagattcagggcagttttgattactgtacaaaactgtttaaaaagaaaaccattgctgtattggccaaggattacgtcatgatcctttcggcgattatgagaaacccatccattcctttaaaagacattcaattaagcgaaaaagtaaacaaaagtaaacatctcgcaagcacaatcgaattggatttctaatcacgggggcagcggctgtcccggcatgaatgccgcggctgccgccagctgcctgaaaacaggaatgaaaccaactggagggatatgaatgtcagaattcaaacaacaggagttgttctggggccgaatgtttcacacggaagaccgtcccggtgcattcccttcgtttcaagtgtccgactcaacagtaaagcgtgatataacaagcggatctgactgtattcacagttcattgagtgcggaggtatcacggcgcatcctgaccatgacgaaccaaacgccaatggccgtctatctggttctcctggtcggaattgaatcccttttatacaaatacacgggggatgagggagtgattacaggggttccagcctttgaagacgaaactgatgaagatcttcgttcagaccagctcatgttaatcaaacagcagatcaattccggcagtacgtttaaatcaattttccatgaattgaaacatacgctggacgaagcgatcttatatcaggacgttccctttgataaaatggccggacagctgaggctgaactacaatgcaaatcatttgccgatcatccatacagttgtttcactagagcaaattcattctgatggtttcatagaaacggctgctgcagatgctttatttcagtttgctatgggtgaagacttgattgacctaaaattatgttttaatgaacaagtctatgaccgtcagtatatgatgcaggtgctcggacatttaaaccggctattttctgtcatattatttcagcctgacctccccctcggccaagtggatattttgccagaatcggagacacatacacttctcgttgacattcaaactgcgaaaactgaatatccgcgggataagacggtttatcagttattcgaagaacagatgaaacgaacaccggatcaagcagccgttatttacggagaaaagcaattcacatatcgtcagctcaatgaacgtgccaatcaattagcccgaacgttaaggaaaaagggggtaaagacggaccggctcactgcgattatttgcgagcatgagatcgaactggtcgtgggaatattggccgttttaaaagcgggaggggcctatgtgccaattgatccggattatccgaagcatcgcatacagtatatagcagaagactcccaagctgatatcatcctgacgcagagccatcttcaaaaacagttggaacttgcgggcacaatggttttcctcgatcaggaaagctcttaccacgaagacggctctgacctggaaccgatcagcagtacgaaggatttggcttatgtcatttatacgtcaggctccacaggcaagcctaaaggagtggcaattgagcatcagggcttaaccaattatatttggtgggcccgccgggtctatgtcaaaggggaaaaaaccaactttcccctatattcgtccatcgcttttgatctgacgataacgtctgttttcactccgctaattacaggaaattccattattgtctacggaggagaaaacagtgctgccttgcttgattgcattattcaggattcaaggacggatattatcaagctgaccccggcgcacttgcagttattgaaagagatgaatatccctgctgagtgcaccattcggaaattcattgtcggcggtgacaatttaagcacgcggctcgcccgtagcatcagcggaaaattcggcggaaaaatcgaaatttttaacgaatacgggcctacagagacagtcgtcggctgtatgatttattcctttgatccgcaaaacgacagacgggaatcagtgccgatcggaaccgccgcggacaacatgaacattttcgtgctggataagagcatgaagccggtgccggccggcgttccgggagaaatctatatcagcggggacggcatcgccagaggatacttgaacagagcggaattaacagcagaaagatttttgcagcacccctttgtgccagaggtgaaaatgtaccggacgggagatttagcaaggcggctcccggatggaaatattgaatatttaggccggatcgaccaccaggtgaaaatccgcggttaccgcattgaaatcggggaagtcgaatccgcatttttccaaataccgccgattcaagaagctctcgttacggcacaagaaaccaacggggaaacatccttgtgcgcctattataccgcacagcattctttaaccgcaggcgaaattcgggagcgcctgtcccggcaacttccgtcctatatgatccctgcttattttgtacagctggcagcgatgccgcttacttccaacggaaaaatagatcgtcaggctctgcctgctccaacgggaaatctcactggaaatccttatacagctccgcggacagaactggaaaaaatactggccggggtgtgggaatcggtattaggcgcagaacaggtcggaatcgatgatcatttctttgagctgggaggagattcgattaagtcgattcaggtgacctcaagcttatatcaagccgggtataagcttgacatcaaacacttgttcaaacacccgacgatctccgggcttgctccttttattgagcccattacccgaatcgcagaacaaggggagatcaaaggccgtaccttattgacgccgattcagcattggtttttcgcccggcaataccctgatccgcatcattataatcaatctgtcatgctttattttaaagggggtttggacgaatcgaagcttcagaaagtcatgaagaagattgccgagcatcacgatgctttgcgcatggtctatgttcagggagatcatgaatacgaagccagaacccgcgggatcagtgaaggagaattattcagcctcgacgtgttctctttactcgaagaaaacaaccctgccgaaacgatagaaacgatagcaaatgacattcagcaatccatccatttagccgatggaccgctcatgaaactgggattgtttcaatgtcaggatggcgatcatttgctgattgcgattcatcatctggttgtagatggcgtatcgtggaggattttacttgaggatataacgtcagcttatgagcagctccaaaacggagaagcgctcacgctccctaagaagacggattcctatctgttatgggctgaacgattgaaacgttatgcagaaagtccggaatttgaagcagaaaatcaatattggcttgagcagaaacatatctcgcaacacaaattgccaaaggataatgagcaggagaccggtctggccgaagaccgggaaacgatcatcgtccaatggacagaggaagaaaccgagcatttattaaaaaaatcgaacagggcctatacgactgacattaatgatttattgctgaccggactcggaatggctgttcatcgctggacggggcatgaagaaattcatgttcatctggaaggacacggcagggaatctatttttcaagacgttgatatttcacgtacagtgggctggttcacaacccaatacccggtttctcttcaaatccaggcagaccgggacatctcccagcggattaggacggtgaaagaacagctgcgtcagattccccaaaaaggaataggatatggcctgatgaaatattcgtccgatcatccgaaggcatcagaatggaccggacatccggaaatcagcttcaattacctcggacaatttgatcaagatctcgaaaatggaggaatcgaagtatctccttactccggagggaaaattgcaagcgacagacatcccattgcctatacgcttgacattaacggcatgatctcagacggccggctgtcattggccatcagttacagcggtaaacaatatcgaagagaaacgatggaaacatgtgcagctctcttaaagaacagcctaaaagaagtcatcgaacattgcgcagctcaagaagacattcacctgacgccaagcgatatctcactgaaggacataacaatcgaggaattagatcaatttgttcagcaaacacaacatatcggcgagattgaaaatatatatccattaactcccatgcagaaaggtatgctgttccatagtttaatcgattcggcttccagagcttactttgaacaagccgtttttgatctcaaaggcggcttggatatcgaggcatttacaatgagtttgtcgcagctggcggaaagacatgagattctccggactcatttttatacggaatggaaagatcagcctttgcagatcgtattccgaaaaaaaccgatcgaaataactgttgaagatattcgaagcatgaagaataaacaacgaaacgagttcattgccggctttgtacaaaaagataaggcaagaggattcgaccttatccaagatgcattaatgcgcgtatcaatccttcgtacagaggatgaccaagtccgattgatatggagcttccatcatattttaatggatggctggtgtctgcctcttattacgaatgaagtatttgaaacctattatgcgattcttgatagaagaaaagcggagcgggaagtcgtcaccccgtacagccgatatatcgaatggctggaagaccaggatcataagcacgcttcagcctattggcaaaaatatttggacggttatgaaggacaaactgttttactgaaagaacctgtctcaaaccaagccaagggatatcaaaaacaaaggcttgcatgccggctcggaaaacagctgtcagaagaaatcagacagactgcaagcaagcatcacgtcaccgtgaatacgttcattcaaagtgcgtggggactattgctgcaaaggtacaacaacagtcaggatgtcgttttcgggtcggttgtatccggccgcccggcagaaattccgggtatcgagtccatggtcggcttatttatcaacaccattcccgtccgtattaccgctcagcctggaatgactgtggaacaagtgttgaaaatgagccaggagcaggcattggcttctcaagggtatgatacatttccgttatatgaaattcaggctcaaactgaacaaaagcagcagctgatcagtcatatcatggtatttgaaaattatccggtcgagaaacaaatggagcatatgaaaccgaatcgtgacgcactggacattatcaatttccatatggaagagcatacccattacgatttcaatttcattgtcatgcccgcgggagaaatcgacattcattttgtatacaatagcaacgtctatgatcatgcaagtgtcaagcggatggaagagcattttatgcaaatcattaagcagatggtgaacagtcaggcgattcgcgtccaagacttggatatacttacgggggatgaacgttcgctccttatagaggcatttaatgatacggaagcagattatccaaaggaaaagacgcttcataaattgtttgaggaacaagcacagcgtacgcctgatcaaacggctgtcgtatacggggaaagccagctgacataccgggaactgaatgaaagagccaatcaacttgcccggacattgcaatcagaaggcgtgcagccggatcagccggtcgggattatggccgaacgttccttggaaatgatcgtaggactcttcggaatcttaaaagccggcggcgcgtatgtgccgatcgatccgagctatccggaagaacggattcactatatattggaggattcggatacgaagctgttgttagtacagagtcacttgaggaaaagcgtgccttttacgggaaaagtgcttgacctggaagatccgcgattctcttgggaagatggttcaaacttgaaacagactgccggaccgaatcacttagcttatgttatctatacttcgggatcaacaggccgaccgaaaggggttatggtggaacaccgatccgtaatcaaccgtctcgtttggatgcagaaacattacccgctggataagcaggatgtcattctgcaaaaaaccccaatcacctttgatgtatcggtgtgggaattgttctggtggtcgatgactggttctaaagcggtattgcttccaaacggaggagaaaagaaccctgacgtcatcttagatacgattgcgcagaaaaatgtcaccattatgcattttgtgcctgcgatgctgcatgcttttcttgagtccatggagcaaaaatccgacgaggaattaaagagaaagctggcatcattaaaatatgtatttgcaagcggcgaggctttgacgcctgcgcacgttgcggggtttcatcgcttgatcacaccggcgggtgaggctcaaatcatcaatttatacgggccgaccgaagcgacgatcgatgtatcgtattttgaatgcgaagcgggagaaacgcttaactcagttccgataggtaaaccgatttccaacattcaattgtatatcgtacaccccgaatcggaatattttcaaccgctcggtgtggcaggagagctgtgtatcgccggagacgggctcgcacggggctatttgaaccgcccggagctgacggctgagaagtttgcagctcacccatatgaagcagggaagctgatgtaccgtacaggcgacttggcaagatggctgcctgacggcaatatcgagtatttgggaagaattgatcatcaagtgaaaatccgaggctaccggatagaactcggcgagatcgaagcatctttactacaactcgatgctgtcaaagaagcggtcgtcatcgcgattgaaaaagagggctcaaaacagctgtgcgcttacttgtcaggagacgagtcattaaatacggcgcagctgaagcgtcatttgctgaacaatctgcctacgtatatgattccggcttattttgtacaagtagagaatatgccgataaccgctaatggaaaaatcgatcgaaaagcgttgccggctcctgagggaaataggcttaccggaaccgaatacgcagcgccaggaacgttaattgaaaagcagctggccgatatatggaaggatattttagctctgcctgaccccgggattaaagatcacttctttgacgttggcggccattcacttaaagtattgcagctcattcatcaaattaacgccagtatgggaatcaacatgcattatcaagccgtatacgattttcctaccatcgaaacaatggcacgcgccattcaagcggccgttttcgaatccgagacggataacgtattcgtcaagctgaatcaggaagattcaatccctgtgttctgtttcccgcctttaatcgggtatggactcgtttataatgaaatggcgaaaagacttgacggcgtcagcaccatctatgccgctgatttcttagaagagccgtctcatgggaaagagatcgttgaccggtatgcagaaagcatgataagcattcaagaacaagggccttttgttctgcttggttactcttccggatcgaatttggcttttgaggttgccaaagccttagaaaagcgggggcgcaccgtatctgatgtgattatgctggattctaaaatcaccgattcggtaactcatttatcggaagaggaaatccaagagatcgtccatctgaatatggacattattccggactactacagagaaatattaaccattccttcgattaaggataaaatcagaggctatcttgcgtatcacaatgaactgatcaattccggcgccgttaacgccaacatccatcatttgctatgcggcgatgtaaccgatgataggggctggacacaatcaacagcacagcattatcttgagtacaaattaaaaggagatcacgtgacgatctttgaacctcacaatatcgaagaaaatacggatgcaattcgatctattattaaacggattgaagaacggcatcatcacggacttgttcttgaagaacaactgtcaataggatcgtttgctggcgacacgaagtttgacaaaatgtaagtgatcaagtgtaaaacgccgctggcctggcactcagcggcgttttttattaaaaaggcgagagtcatactcctgtgttcgcaaggcttactccagagccgttctccatgactggttgtcatcaaatggtaaaaaaatcatcatacattttaaggaaaaagaaggatgtcaagttattagaaaaaagtgtagcgtatgtttatgggtactagctctattattgagttgcttaactgcggagtctgctttttactgccggtactgcaatttggtctcaaatggtaaaagttccccgaatttaaagaaaaaggaggagtgttaagttatgtgtaaaaaatgttgcgtatgcctatgggtccttgctttattattgagttgcttcactgggaagtctgcgtatgctgccagcactccaattgcaaaacatgttgggaattcaaatccgcttatcgaccatcatctgggcgcggatccgtttgcgctgacctataacggaagagtctatatctatatgtcaagcgatgactatgaatataatagcgacggcacgattaaggataattcatttgccaatttgaataaaatatccgtcatatcttcagcggatatggtgaactggacagatcacggagcgattcccgcagcgggtgccaatggggtgaatggcggccgggggattgccaaatgggcaggagcatcatgggccccgtcagccgcggtgaaaaagatcaacggtaaggataaatttttcctttatttcgcaaacggcggcggaggtatcggggttctcaccgcagacagcccgaccggtccgtggacagatccgatcggaaaaccgctggtgacgccaagtacaccaggaatgtccggtgttgtatggctttttgatccggcagtattcgtagatgatgacggtaccggttacctatatgccggcggaggcgttccgggcggttcaaatccaacgcagggacaatgggccaatcctaaaacagcaagagtcatgaaattagggcctgatatgaccagtgttgccggaagtgcatctacgattgatgcgccttttatgtttgaagattcgggaatgcataagtataacggaaaatattactattcctattgtatcaatttcgggggcgcgcacccggccgataaacctccaggtgagatcggctatatgaccagctcaagtcctatgaattctttttcgtatagagggcactttctgaaaaatccgggagcatttttcggaggcggcggaaacaatcaccatgctgtttttaattttaaaaacgagtggtatgtggtgtatcatactcaaactgtcagctccgctctttacggggccggcaaaggataccgttctccccatataaataagcttgtgcataatccagatggctccctgcaagaggtagcggcaaattttgcaggtgtcaaacagctatccaacttgaatccatataaccgggtagaagcggaaacgtttgcctggaacggacggattttgacagaggcatcctcagcacccggcgggccggtcaataatcaacatgtcacaaacattcataacggagactggattgctgtaggaaatgcagatttcgggtcaggcggtgccaggacgtttaaagcaaatgtagcgtccgctctcggcggaaaaatagaagtgcgactagacagtgcaaacggtaagcttgtcggaaccttgaatgtcccttccacaggcggaacgcaatcctggagagaaatagaaactgcggtaagcggcgcatccggtgttcacaacgtattctttgtatttaccggaactggtacaggaaacttgtttaatgttgattactggcagtttacacaaagataagcaaaggtacgttttctaagtctataaaagataaatgaaggagaggaaaaaatgatgtcgagcgtaaaaaaaccaatttgtgtattattggtatgtttcacaatgctgtccgtcatgctgttaggaccgggagttactgaagtttcagcagcaagtgatgcaacagttaatatatctgcagaaagacaagtgattcgcggttttggaggaatgaatcacccggcttggattggagacttgactgcggctcaacgggagaccgcttttggcaatggacagaatcagttaggtttttcggtcttaagaattcatgtagatgagaatagaaataattggtacaaggaagtggagactgcaaagagtgcgatcaaacacggagcaatcgtttttgcttccccttggaatccgccaaacgatatggttgagactttcaatcataatggtgacacatcagctaagcggctgagatacgataagtacgccgcatacgcacagcatcttaacgatttcgttaatttcatgaagagtaatggtgtgaatctgtatgcgatttctatgcagaacgagcctgattacgctcacgaatggacatggtggacgcctcaagaaatcctgcgtttcatgagagagaatgccggttccattaatgcccgtgtgattgcgccggaatcatttcaatacctgaaaaatatatcggaccccattttgaacgatccgcaggcgcttaggaatatggatatcctcggaacccacctgtacggcactcaggtcagtcagtttccttatcctcttttcaaacaaaaaggagcggggaaggacctttggatgacggaagtatactatccgaacagtgataacaactcggcggatcgatggcctgaggctttaggtgtttcagagcatattcatcattcaatggtagagggagattttcaagcttatgtgtggtggtacatccgcagatcatacggcccgatgaaagaagatgggacgatcagcaaacgcggatacaatatggctcatttctcaaaatttgtgcgccctggctatgtaaggattgatgcaacgaaaaatcctgaaccgaatgtttacgtgtcagcctataaaggagacaataaagtcgtgattgttgccattaataaaaataacacaggggtcaaccaaaacttcgtgttgcagaatgggtctgcttcgcaagtatccagatggatcacgagcagcagcagcaatcttcaacctggaacggatctcaaagtaacggataatcatttttgggcccatctgccggctcaaagcgtgacaacatttgttgtaaagcgttaaaggcatcagcattgcattaagccaattttcttactcggaaaagaaaattggcttattttctgtgggagagaatgttgattttttaacgatacacggacattgggtataataatgacaatgacttcaaggagtgatcaatatatgtcacggcttcacagcaaagtattaatcatagacgatgaaaaagaaattttggaactgatcaaaaccgtattaataagagaaggcattgatcgcgtagtgaccgcttcaactgcccgtgacggattggctcaatttcatcaagaaaatcccgatcttgtgatattggatatcatgctgccagacggtgaaggctatgatatctgcaagcaaataagggacatttcacacattcctattatctttttgtctgcaaagggggaggaaacggataaaattgtaggacttgccatcggcggggacgactacattacaaaacctttcagccctaaagaagtcgcataccgggtcaaagcgcagctgagacgggtctcttacttacagccttctcaaaccggaaccgtgataaaaaaagggccatttgaattaaaccaacaacaagccgagctcaccaaaaatgaagcggctattgagctaacacctaaagaacttatgcttatggcctattttctgcagcatcccaatcgggtgatcagtaaagaaacactctatcaagctgtatggggagaagactttttcggttctgacaacacggtgatggttcatatacgcaggctccgtgagaaaatagaaactgtcccatcaaaaccagactttctcgtcactgtgaaagggttaggctacaaatttgttgtaaaggatgcgtaaggatgaattggcgattaacaggcagatacatggtatctgtcatcatagtgaccatcattacagtcttcattaatttatttatttttatgttttggctcgttttacaggcgaacagccaacatgacgaagaaagtacacctgaaactttcacaagatcattcggacaatatgtcacgttatcgaacaagggtatcacagtaaacaaagagggccaaaaagctttaaaagagcagaatgcatggattcaaatattagatgaaaacggacaggatgtttatcatgatagagaacctaaaggactgaagaaaaaatatacgcctattgaaattgtaaatttacataaatataaggatgaacaattattatcaaccatttacgccggcggaaaaaaagtaaacggcaaggagtacagttactttatagggtttaaaaatccctctctcggaaaatttgtcctctcatatgataccaaggaatttgtgacgaagttcaatacaggaaccatcatattattatcaatagatgcattgatcgcgttactcattggctatctattcagccggcagctcacaaaaccgctcggccgtgtcattcaaggaatccagcggttagctaatggagattatacgatcaaaatgaaatccaaaggcatttataaagatgtgttctataatgtcaatcacttatcggaacaactatctttaagcaaaaaagaaaaagataaattagagcaaatgcgtgaagagtggatcagtcatatttctcatgacattaaaacaccattagcatctattcaaggctatgcagaaatcatcaaagatccgaattatcatctcacagtcgaacagatcagagattacgcccggatcattgagagtaaatcgctctatatgaaagatgtgatggaagatttaaatttaacgacaaggctgaaaaacaacgatgtgatgttaaataaagaacgggtaaaccttgtatcgctgctgcgggaaacgttaattgatattttaaacgattcgagatatgcggataagtccattgagcttcaaacgaacctggaaaaactgatgctgaaccttgatgcgatattgattcggagagcggtcacgaatctcattttaaatgccctcgttcacaatgatcccgatgtgaagatcgttgtacagcttgaacaaaaagaacgaactcatgtgacaattaaggacaacggcaaagggatagaagaagaggagctggaaaaagtgtttgatcgctattacagggggacaaatacaggaacgacgcatgcaggctctggtcttggaatggccatagcaaaggatattatccaaaagcacggaggggacatcaccattcacagcaccgcgggagaagggacaacgatagatatacaattatcataatggctatacaaaaaaaacggttctgctgattaataacagaaccgttttttcctattgttccgaaaacactttgattcctttgacaatgttccaaatgaaaaaatagatcgccacaaggaatgtaacagcataagtcgcaagcaggaaaggcccggcatgtctgatatcattcataccaagtaaacctgaagcgatgatgccaattccaaaaatcaaataaggaatcagatgcgtccacaaagattttttcgcatgttctttcacatcgtcccggcttaagaaatagacgataatcggaaacagaaacggcgcaaaaaatatactgaagtaacataatgaagacaaaattttattttctctcaaaccttttcacctctatgatttattgaagggggaattcttctggctgaatcccacactgaagtacaatcttattgtacaactccaaccttaacccgtattaatccgaaccttacatcaaccttaaattaacaaggacgggcaagggctcgtcttcttacagcaatcataagattcaatgccatattgagactcatcacattacatttagagcgtctacgtcggaaatacatttaatttttcgattcgattgaaaaataacgtgtaaagtcccgattcagtccagttttctttgttctatatgtgtcaggtgtgtcttattcaatagagttagagcaaattgacaggcttttaaacctcccaaaaacaagaaattaggttgatagacaatcatgagaaagatttttacaatgagttcgagctcataagaagtgaagagccaaaataatgcgaaggaggaaaagatcagatatgaaacggtcaatttctatttttattacgtgtttattgattacagtattgacaatgggcggcttgcaggcttcccaggcatctgcagcagggacaaaaacgccagcagccaagaatgggcagcttagcataaaaggaacacagctcgtaaaccgggacggcaaagcggtacaattgaaagggatcagttcacatggattgcaatggtatggcgattttgtcaataaagacagcttaaaatggctgagagacgattggggcataaccgttttccgcgcggcgatgtatacggcagatggcggttatattgataatccgtccgtgaaaaataaagtaaaagaagcggttgaagcggcaaaagaacttgggatatatgtcatcattgactggcatatcttaaatgacggcaacccaaaccaacataaagagaaggcaaaagaattttttaaggaaatgtcaagtctttacggaaacacgccaaacgtcatttatgaaattgcaaacgaaccaaacggtgatgtgaactggaagcgtgatattaaaccgtatgcggaagaagtgatttccgttatccgcaaaaatgatccagacaacatcatcattgtcggaaccggtacatggagccaagatgtgaatgatgcagccgatgatcagctaaaagatgcaaacgtcatgtacgcgcttcatttttatgccggcacacacggccaatctttacgggataaagcaaactatgcactcagtaaaggagcgcctattttcgtgacggaatggggaacaagcgacgcgtctggaaatggcggtgtattccttgaccagtcgcgggaatggctgaattatctcgacagcaagaacatcagctgggtgaactggaatctttctgataagcaggaatcatcctcagcgttaaagccgggagcatctaaaacaggcggctggccgcttacagatttaactgcttcaggaacattcgtaagagaaaacattctcggcaacaaagattcaacgaaagaacgccctgaaacgccagcacaagataaccccgcacaggaaaacggcatttctgtacaatacaaagcaggggatgggggtgtgaacagcaaccaaatccgcccgcagcttcacataaaaaataacggcaatgcgacggttgatttaaaagatgtcactgcccgttactggtataacgcgaaaaacaagggccaaaactttgactgtgactacgcgcagattggatgcggcaatctgacccacaaatttgtgacgctgcataaacctaagcaaggtgcagatacctatctggaactgggttttaaaacaggaacgctgtcaccgggagcaagcacagggaatattcagcttcgtcttcacaatgatgactggagtaattatgcacaaagcgacgattattcctttttccaatcaaatacatttaaaacaacgaaaaaaatcacattatatcatcaaggaaaactgatttggggaacagaacccaattagttaagctttaggcggacatcagcaacgatgtccgcttttatcatcttaaacagcaatacatggaggtttacgtgaagaagtagatatgactgtacatataatgtaatcgtttcacagttttgaaaagcgtttatagcgcaatgtatgtattttacacccgccacttttattacttaagggggaacaagagaatgaaaaggtatgacgcatttccagagccaaccggcggctatactgtcggccgcacacaactggattttgagtacacggcatcagatcatacaaaaagagaactgacggtgtttgtgtactatccgtccgacagcagcgaagggaagactacatcaacgtacatgtttcctgaagtctgcgaaatgcttgatgagcagccgcttctcactgcgcggaagaatgcttactctatagatatcaagacccaatgttacgacggccttgctctctccgggaaggaaaaacgctatccggtgttattctatgtttgcggcgggggcggttctccagaatggggcacagtgatctgtacagacttggcaagcgtgggatatgtggtggtaagcatcggccatcagaatagcacgatgtataagcgtaaagatgggcgcccgtttaatgtatcaaaggattttacgtagaggttttttaatattaccttacaaaaaggggatgctgttagaatatggacccacttatatattctcttcacaatttctagtttacataatatatattctaggaagttatacagagaaatgaattacaagtctcataaaccaagtatactttagttattgagacaaagaagagaaatttataactgcaataaatgtttacagcgctagttttgattcagctgaaaaacctaacgcaaaagcaagcttgaaatgaatttcttgtttggtcattacccgcaatgagatcatttctttaggcaagcatataaaaaatcaggtctgataatactttgccgcatcttccctgcttttttccgcgtaatcataaacaaaaagaacaagattttcagcagggccatctgcccggctgccttcatcataccgctcaatgtaggaatctttgcagccgttttcatttcacgaatcgtgagagacaggcaaagaccgcaagaccgaggccgctcccggtccaaaacgacaaaaaactttctccataagataaacgtgacaatgagaaaaagcaccttgtctttcgtaacgcatcacatcctctaatatgaattgacttccgggtgcattatcttcttcctatctattcatataatgagaaaaagccgcctgataaacagacggctctgcagcttattatttgcttcggttacctgcggaagcatgagtgatccgataatgcacagttaaaaatttcagtccgaacagccacatatgatgaacggccttcaggcttgtttcgctctgggctgaaataagaaatgtctctgccagcggaagatgacacgtcccccatttcgtctggagataaatcccttcatcacccgctccgctttttcgccgtctgcttgtcaaaacaagattctgcttacgcgcataaggctttaaaatgcccgtcatttggccgtacggcagaggaagagagatattcatgtatccttccccttttgacctgtatgctgaatacagcgcagtaaaaacggtttcctgcttttcatttgttctgatccatgcacggacattttttctgccgtctttatcagagtcaactcctataatatcactgtgcatgatataccaatccggattcatggacagatgaatctgtcccgctcttctgctgaacggctcgtacacgcgcgcgaacggacgaaaccaaccgctccacgtcactttcgccatgatgtcataatcaattgtcttttcataaaaggaaataacggccggcgccagcttttcagttgaaaagtcttcagaatgcagttctctcagctgatcctgaaggccggtataatggatgtcatttgctgcatgaatgtcagtcaaaaaatctttgcctatcgttcccttcccgtaaattctgctgaacgttctttcactgttctcatcgaacggtctaggattttctattctccaccccgccaaagccggcaggataacgccaaatgcattgacggccccgtgaatccaaatcatctggctgatcgtgagcgttgcctcctcgcggtagacaccgtacgaatatatcaaagaaaaagcaattgtgatcattaacacagccgaagaactcctgatcaagatcctgcctgttttcgtaacaaacggcgccttaaagacgagatatgcatttacatacagacccgcaagatacagagcgacagcaatcacatcaagtgtctttgaaaatgtaatccccaaggcaattaggaccggcgaaatcaaaataatgactgtgctccaccggtaaagtccgcgtttctcccgtatgatcctgccgagcaatccgttaaagatcggaatgagaaaagcggaatagtgaaagtgcaccgccgtcagcagaacgataagcgggccgaaattcaggacgggaatctcaaggacatatgcgaagaaccagaatccgcccccggccaaataaatgaaacccgccataactgacatctcttctgttctgtgaatatttgttttcatcagccggcggacagcatacagtgccagtccaagcgtataaatgaaccacacaaaggcaaaaaagctgaagcctgtgacaagcgcaagcgccgcacatatagcggcaacaggataactccgtaaccacacattctctaaggtctttgacggccgaaaagcaaagcagaatacagcgggaacgaaaaaaagcacggaaaataaaacaaacgtctcagcagctgatatatgcggagcttcagccgccgcaaatcccaaaaagcaaaccacgcttaccatgagatgacgcttcagcatgtttctccctctgtttcccggaaagtcccccggtaagagaaaagcgtgccgagtatccggtttttcacatgaacctttatgctgaagcaattcatttcctcatcataagcctcataaacggttgaattcccgcacagccatgccggaatcgggattttctttccgcctatcaggagccactgccttccggatgtaataacaagccctccgtctgaagacgcttctaaatgcagttcagacagtaggatgtgaggtttgccgaagtaatcaagaattctgttttcccgctcatcatattccatgaccgcatcaaaaaaacgcgttttgcctttaaagaaaaaggtacgattccattccacgccattttgcctgtttttgttttcgatagtaaaagggatatcgtttcccctctctgagaaaaaacatctgaaaaaaacaccggtctttaaaagcattctgacaagaaaagaacctccctttatttctgacataacgccttctccgcaaaacgtgcgtgatccgtcaaatctgtaccgtttctgcagcatcgggtgcagtgattgataatgagtaatcgttttttcatacattgaatccgtcatttcacttctctctttcgttttgtatgccaggcgctcggcagcttgagcttaagaatcatgccggctatcgtaaggactcctaatgaaatcaagaatccgccgccggaatataacagtgccgttacacaaaagaagactgactgcccggcgtgaatcagccactttctccgcatgggaagcagccataatacccctaaccctgtctccagcgttcccctcacgatctctgcatcggcacagccatcatgaaagccttgaaaaaaccaatacagactgaatacgaggcacatacagacatagacaaatccgaaacggaccgatatcttcggatgtctgttttgttctatccaaagccgcaacgcatcaaagctccatgcggtagcccagcttagcagaggacgaaataaaaaccggtctatccaacttcccggcagaccgcgggccgtttcatattgatattgagtcaaaaatgaggtttgtccgttatcccgctctgtatacttccagtagcccctgccttcttttataagtgacagcggatgatcagaggcaaaagcgagcgaagacactctttctgacaagcgaggccttatgtcacctattgattcgcccgtgccggataccttcagcccaaaaccgattcgtgtttcatatagaaatctctgcggttcatctggcagcctatgaagatatgtaatgtcagaaaaacgcagatcccattctttatgaagatgcgggttttgcgtatattcccaaagcgtttctatatcagatgcaatattgatttcgacatatatcggcttctgtttcatgctccctcctcttcccttcttttgtaaacaattcctatattatcataggaacagatcaagcgggagaacgaaaaggccatcccgttatcggcaggacagcctcagtggctttgatgacttatgaataaggtatcgtgtcttttttatcttcagaaactgtttgaatgataatcggacgcacaaaacggattaccgcagccgaggccaaaacagctaatccgcctgcaagcaaaaacgcccccgagaatgatccgcttttatccgcgataaagccggttaaagcaggcccgataataccggccgtgtttgcaagaaaatgcataaagccgccgactgacccgacattcctttgatcaaccacatcgtgaatcaccgcccaatagatagagcccgttatatataaaaagaagactgataaagcaacgagaataacggcacttacggcagtggtaacaagtccggcaaatccgatcagtacagcggaagcgaacaggcaagtgacaagaatgactttccgtgagaacaaaaccccttttccggcggtttttttgtatacataatcagaaatcattccgcctgccgccaaaccgataaatccaagaatccagggaataacagtcaccacgctcataaattcaatacttaatccgcgttctttcaccagatagctcggaaaccatgttaagaagaaaaataagatgtaattgtaggcgaaaaaggcaaaagccgtgaagagaaccgttttttgttttaaataaaaggtcatcgggatatgctgctcatgcgattgaaccgccgctttcattgccggggtgtcttccgtctgtgccggccgttctttgacaaatttaaaccagataaacgcccagactaaaccgacgatcatgatcaggacaaaggaaaccttccagctgaatgccacagcaatcatcccgacaatcgggccggaaatcgctccgccgagcggcgtgccgctgtttgtcaggccgatgaccgtggcgcgctgagacggaggaaaccaattgttgaccattttgcttatggcagccgacagcggcccctcgcccataccgaataaaacacggataatcaaaagacttacaaatccgaaagcaagcgcaaccgccccgctgaaaagagaccaaacgatcatcgccgtacacaatgtcaatttagccccgtaccggtcagatgcaacaccgccaaggaagttacacacagcgtatccgacagaaaaactgctgaaaatcagccccatttgggttgcagacaatgtgagatcctgctgtatgaacggcgccgcaatagacagcgctgaacggtctaaatagttaatcaccccggctgaaaataaaagaagaagaatagggaatctatcctttgagaacataaaatccctccctcttatttcataatttaaattgccggagtaaaccggtttatgtaatgaaaccggttatccggattgccttgccagaagcgccggtttatagcggtgaatccgtttttcaccgctatctttttcttgtatctggcaaagaagaaggcttcccgcttttcgcgccatttctgccgcaggctggacgatcgtcgtaatcggaggagtaaaaaaacccgcaaaaggaacttcatcaattccgatgacggctgccttatccgggattgtcatatcatgctccttcatatacttcagcacctcaacaagaacgatatcgtttgccgccaatatcgctttcggaggctcctgaagtgagaacagctctgacaaaacattggaaatatcagccgcatcggctgttttgatatattcgttccgcaccatcatcccgtgggggtcaagcgcctttttatacccttcaatccgctctaccctcggactgatttcccgaataatggacgtcgtaataatcgcgattctcttaatgccgctctcgataaaccggtcaacggcaagaccggctgcatgatggttatcaagcatcactgtcggaatcccgagttcttcaatggttctgtccataaacacgaccggaaacgtatcgcgtttcatcttttcatataaggagagattttcgcccgtcggaaaaataataattccgtccacctgcttggccctgagcatttcaatatatttcttttctttttccggttcatcatccgcattgcagacaataatatgaaatccttgttcatgaaaatagtcttccaccgccctgatgacctgagtggaaaaggtgtgaagaatattagccaccaccacacctaccgtaaatgttgatttctgttttaagctgcgggcgacgaaattcggctgatagttcagctcatgaatggccgcttctattttttgtttcgttttctcgctcatatagtcatagcgctgatttaaaaattgagatacggtgcttttagatacgtttgcatatttcgccacatcagaaattgtaatggttttcatagactcatccccgtctgtcttcatttttcactagtataagtcagaagtaaatagtttacaatctgacagggaactggattctgtcacactcccgaataagccataaaacctccgtcgacgggaacggtgaccccggtgataaagcctgagtatgaatcatccgaaagccacaggagcgttcccagaaggtcttccggtttcccgaaacgtttcatcggtgtatgtgccataatcttattggatcggtctgtcagacttccatcttcctgtaataacaactcacggttttgcgcagtcaaaaagaaacccggagcgatggcattcacccgcagcccttttttcgcgaaatgaacagccatccacatcgtaaaattctgaaccgccgccttagccgcactgtaggcaggcacctttgtcatcggtgtatacgcactcatagaagaaatattaataatcgcgggacattccgccttcaaaaggtcttttccaaacacttgcgatgccagaaatgcaccggtaaagttgcttgaaaatacgctggaaaatcccgtttcgtccatatcaaaaaatgatgggctctgctcatcctcttcatacgtctcattggcagtgatcgcatcagcgtggtttcccccggctccgttaattaaaagattgacagagccgaaccggctgataatctcgtcttttgccttttcgagcgaatcacgggctgaaacatcagccggtacagaaaccgcggttcctccagcatcagcaatctcgcccgccgcacgctctgctttatcagcattccggctgacgatcgcaattttcatcccctgccgtgaaagctcctttgccattgctgaacagagaacaccgctcccgcctgttatgacagcggttcttcctgataaacgtccatgaatcggtctcatctcttcacctctttctcatgagacgagaacgcatcccacagtccgctcaagtacataattcctaaggcacgatcatataaaccatagcccggccggcattgttcgccccagatatgacggccgtgatcaggccgtacatatcctttgtagccttggccgtgcaattcttttaccacaccgataatatcaatggacccatcactggtaagatgcgaagtttccgtaaaatcaccgttatcgcagattttcacatttcgtatatgggcaaacggcgcagctcccgcatagtgtttggcgatcttcaccatatcattggcgggatccgctcccatcgaacccgtgcacaacgtaatacagttggcgggtgaatctgaaatctctcgcagcttttcataacttttctcaccggtgataatacggggcaggccaaaaattgaccaaggcggatcatccggatgaatggccatttgaatgccgtgttcctccgctacaggaaggatttcatgtaaaaagaattctagattggcccaaagctgtttttcaccgaccgtttgataggcttcaaacagttccttgatccgggccattttctccggctcccacccgggaagcgtcaaatcagaagattcttcaaccgtgcggatcagttcttctggagggagactttccactttcgctttttcaaaaaacaaagcagttgacccatcctccagtgcgcggaacatatcagtacgcgtccagtcaaaaatcggcatgaaattgtaacagatgactttcacgccgaattcggacagattgcgaatggtctgtttatagtgctcaatatattgtccgcgttcttcatggccgagtttaatggcttcatgaacattcacgctttccacgacctctgcatgaaacccataggattgaatgaatctgacttcggcttcaatgtcctccttttcccatacttcgcccgcgggcttctggtgaagagcccagacgatgcctttgaccccgggaatttgtctgacatgttcaagcgtcaccgtatcattaccttggccgtaccagcgaaacgtgatattcatgttacacccccgtatattcgttttttcggcagacgtattctttgctgagggatacggcagcttcatagccgcccttttgatatgcttttgtcaagtcgcttcccactccgaccgcgaccgctccggcagaaagccagtcattcatgctgtttaatgagatacccccggtcggcataatgcggacattcggcagagggccgttgaccgacttgataaatgagggattaaacgaattagcggggaacagctttaccacatcacatccggcttcgagcgccaaagccatatcagacacgctcatgcatcccggaagatacggtacgctgtactggttgcatagagatgctatctcttttacaaaatgagagctgacgataaatgaggcgcctgataaaatggcgtgtctcgctgtttcggtatccattacagaaccggctccaagaagaatatcttgatgccggagttccttaaagacatcttccacttcaggagttgtgtatgtaagctcaatggcgctgatacctcctgaaatggccgcttttgaaacttcaagcgcctcttggctgttttgtccccttatgacagccaccacttgtgcatgcagaagtttttcgtaaatggcgtacttaggcagcattctcgctcctcctttaatcaaacgtaatgattgcttttcccaccttgcccgggtgctgttcgatcaactgaaatgctcgatggacgtcatctgctgaaaatgtatgtgtaataagaccgccgtgcgttaacaggcctttattcagtaagtctgtaatgtacggaaactgattcgtctgcaatcttgaaccggtgatcgtgacttccttttttgtgatcggaagctgagaaatgccggcagtcctctcatcaaaaccaagcacaaccacatgaccggccggagacactgcgtcaattgacgtttcaaacgttgaggggagacagacggcatcaatgacgacattagcgccttcattttttgtccattcgttcacccgcaaaacgggatcttctttttgcgcgttgacggtaacatccgcaccgtttttttcagcgaaggccaagcgttcatcattcaagtcggttatcatgacggaagcgcctttgaactttgccatttttaatatgcagattccgatcggccccgctccttgaatcaaaacggtatcttccttctcgacacggcctctccaaacggcctgggcgccgatcgtatatggttctgccatgaccgcttcctcccagggtagatcgggcgaaacagcatacagctgcttttccggaagcacgatatattcccgcatcccgccatcttcatgaacgccgaacaccgaaagcgctttgcagacgttcggacgtcctttccggcaggcatagcatgttccgcaataagatatcggttcaatcactacccggtcacccggcttgaaacgccggacatgagaaccggtctttgcgacttcccctgtgacttcatgtccgattactctcggcagggacgctaacggatttgtcccatgataaatatgcaaatctgatccgcaaattccgacccgattcaccttgacaagaacatcatccgcgtggacaacagacggtttctcacattccgtcaccatcagatcaaatgctttccgtacttgaaccgctttcattttttcacccgctttttaagttgtgcttgctaccgttcaatcacagtctctttgtttacaaatgacagaacctcttctaggcagggaagcccttcattgtcaccggaaactgtggtgacgagcgcaccgactgcatttgcaaactccagacgtttttccggttcaaaaccatgtagataactgtacaggtagccggcattaaagccgtcacccgctcctaccgtgtcgacaggcgcaaccgggaaagcctctttgtgaacccacttatgatcatgatacagcgcagaacccgcttcaccgtcttttatgacaagctgactgattgaatagctctctgcaaaccgggctaatgcttcattttctcctatacctgtcagctgtttcatttcgtcccggcccgccagaagaatatcagtatgcggaaagatttgatgaaatgccgcacgtgcctcctcaatcgtccacagcttcagcctgatattcggatcaaaagatacgggaatctttcttgctttggcgatggaaagcaccctttcagcaatttcaagatttttcttaccaagcgcgaggaacacaccggtaagatgaacgatgtgaatgccgtcaaacatattctcagttatatcttccggtgcaagagtcagaattggtgaattgaaacgataataaaacgtcttgcctgaaccgtcatttctgatctctttgacatttaaagatgtaggaaagccttcaacaaaggagacgtcagtcacatcaattccttctcctttggcaaactgataaatcactctgccgaactcatccttccccagtctgctgacccactttgagtgcaggttcaatctggcgcatgcaatcgcaaaattcagttcagctcctcctgcttttcgttcaaaatgggtaacaaaacgcaaaggtcctgtgcttgcgggatttaaggtgatcatcgcatcaccgatcgtaaaaatgccataatcagaagccacatcaatactcctttcctttaagactaaatcggtttggtaaaccggtttagttaaactttatatgaaagcacttacatatacaagagaaaaatacaataaattcaaaaaaatctgtttccagtaaaaataacccggtttttcacataaaaaacccctcacaacaaaatgtaagggggttttttgaaaattgtatgcatgtttcctcagttagcagtcttacgttcagggcttgtaccttcttcttccgcccatgtttcaatatgcttgagctccggagtattctcggctttgaatacgggatcaagaccttttttgcgctgagcggcataatccttatagatcttgtaggctacattactcagcagtaaaattgccactaagttaatgagagccaagagacccataaacaagtttgccatgtcccagacgatctggaagtcagccaaacatccgtataccaccatcactacgacgaatacgcggtaaatattaagccatgttttgcttgttttaataaattcaatattcgtttcaccatagtaatagttgccgacgactgagctgaatgcgaataaaaacatcgcaatcgcaataaatgtcggcgcccatccgccgagatggtgctgcagtgcggcttgcgtcacttggatgccgtcgcctttaggcgtaacgctgtacaataaaatgataaaagcagtcgatgtacaaacgataaacgtatcaaagaacacgccgagggtctgaattaatccctgcttagccggatgcgacacatgtgcagctgctgcggcattcggcgcgcttcccattcccgcttcgtttgaaaacaggccgcgctgcgctccgataataatgatgcttcctaagcttccgccgacgatctgctcaagaccgaacgcatttttcacaatcgtaacaagcagctcaggtaccgccgaaatatttacaatcacgacatacagcgcgatcagaatatacattcccgccataaccggaacgattaattgcgagacggaaacaacacgcttcagaccgccgaatataatgaaagccgttaatacagctaaaatgattgcgataactgttttattcacatggaatgcttcgtcaaacgccacagaaatcgtatttgactgcaccgcgttaaatataagtccgaaagaaacggtaatcaatacggcgaataaaataccgagccagcgggcgcccagtccctttgccatgtaatatgccggaccgccgcggaattcgtcaccggaacgcactttatacagctgtgccaaggtgctttccacaaagctggaagccataccgacaatcgctacgatccacatccaaaatactgcgccgggaccgcctgttgcaatcgccagcgcgacgccggtcaagtttccggttccgacacgagaagctgctgagataaagaatgcctgcattgaagacactcctttatttccttgcggcttctccccgacgattctgaacatttcaaaaaagtactggaattgaataaagcgaaaacggaacgtaaagtacaatccgatcccgactaaaatataaacaagatacttccaaataaaatcatttggaacatttatgatttcactgatgaaagcctccatgtttaacctcccttttacatatcttttactgtcatttttgctgtatatgttagatcttttaacacaacgggtattattatatcacaacaacagtggttgagaagtttttttaagaaaatgtttcggtttcttcatcacatcttttgctgtcatgccccgttttttatcttacagcctgaaaaatgttgtcacgttataaggaatgcgtgcatatcataacaaataggtctttaagaaaaaagagatgaaaagatggatggaatggtatatacttaaccaggataataattttttaaatttaataaatgtgtttactttacatttaaattagggtattataataaaaatattcagacttatgaagggaggagaacatttgaaaaaaatcttgtttttaaaagcttctattttatttttagcgattgcaagctttcatttgctctccattccccatgcgtttgataccgctcatcattttaaagcggtagccgaccagcaggaaatgcacgaaatgaaggccggccaaaatgctgatgatgagaaaaaatcgctgacgggctcatatatcttgacggcgctttttgccgcttctgtctcactgattgtgatatcagacaggagacgccccgcttcccggagaagacagcgaaagaaaagctttttaatcgctaaattttatcagtcctcgtatttcgatgagcttcatgttcaacatcgcctatctatgtaacataaaatgaggaggttgttaaacatgttgtttatcttacgaatggtgattttagggttgttttcattcactgcattgaatttatttgtatggcagggaatcgaagtcattcacgctatcactgacttattcggcagccatgaaagctaaatagtaaaacctccgctcaatgagcggaggttttttattttatttttactcttaaacatcgtatgcagggatacgccatacatctgttaccggccctgtctcatcttcatcggtaaagaaggagccgttgctgtatcggtcattcgcccgcaaggacttcacggcgatttcgattctctcgcctttttctgtttccgcagcgatcatgtcggccaaagcgcacgcaaatacgccgactgcccgatgcgggttcttttttagctcacgcagcatgatgacaccgcgtttcgccctggatgttttttcgaattcagataggttcatccgtttgattgctccccgctgtgtgacgaggacaagcgaatctgtttcatgcaggatttgccctgatacgacggtatcaccgtcttttaaatttatgccctttacgccggccgcacgggcaccgactacatttacttcatcttcaccgaaccataaaccgtacccgaggcgggtggcgataaacagctggctgccgccgtctgtgacatgaacatcaatcagctcatcatcccctttaaggttaagggcaacaagcgctttcgagtaacgctgcgctttgtaatgcgtcatttcagttctcttcaccataccgtttttcgtcatgaacagtaaatatgaagatggatcaaattcttttaccggtatagctttcacgatggtttcatcacggtcaatcgtgatgatgttcgttacgtgctgccccatgtctttccacctgatatcgggaagctggtgaaccggacaataaacatagcttcccttattggtaaagagcagaagaacatccgttgtattcatttcaaattggtgaatcagcctgtcagtatccttcataccgaaatcctggccgttagaagcggcaaatgaccgctggcttgttcgttttacatagccgtcttttgtgactgtcacatatacgtcctcagaggcaaccatgacttcaagattgattttaatttcctctatcttttcttcaatgacagaccgtctgctgtcagcataggtctttttcaattttttcaggctgcttgtaatgacttttaacagctttttatcatgacttaaaatggcttcgagctcctgaattttcttgctgagctcttccgcttcctcttttagcgccgtaatatccgtgtttgtcagacgatacagctgcaaggatacgatcgcttcggcctgcggctccgtaaatgcgaatttagaaattaagttttgtttcgcatctttcttgtcgctgcttgcccggatgaccgctatgacctcatctaacacggacagtgccttcatcagtccttcaacgatgtgatgccgctcttttgctttttgtaattcaaagacggagcggtttgtcaccacttccttctgatgggaaatatacgcatccaggatggccgtaagactcatcagcatcggccggcggttatgtatggcgaccatattaaagttatatgttgtctgcagatcagtgtttttatataagaaattcaggatgccttttgcatcggcttctttctttaactcaacgaccacccgaagccccgtgcggtcagtttcatccctgacttcagaaatgccttcgacttttttgtctatgcggtattcgtccattttcttaacgagattggctttgtttacttcaaacggaatttctgtaatgacgatctgctcccgtccgcctcttacggattccacttcagccttgccgcggataataattttgcctttaccggtttcataagccttccgaatgccgtcgactccttgaataatgcctcctgtcggaaagtcaggccctttaatcacctgcatcaagtcatcgacagtgcaatccggagattcaatccgtttaatgacggcatcaatgacctcacccagatgatgagggggaatatcagtcgcatagcccgctgaaatcccggttgatccgttaacaagcaagttagggaacatggcgggcaaaacaaccggctctttactggtgtcatcaaagttcggaacgaattcaaccgtatttttatcaatatcacgcaaaagctctgacgcgatagaagataatctcgcttccgtataacgcatggcagccggcggatcaccgtcaatgcttccgttattgccgtgcatctcaatcagcacattccgcactttccaatcctggctcatccgcaccatcgcttcataaacggagctgtcaccgtgcggatgataattaccgataacgtttccgaccgtttttgccgctttacggaaatttttatcgaatgtatttccgtctgcgtgcatggcgtataaaattctccgctgcaccggctttaaaccgtcacgagcgtcgggcagcgccctgtcttgaataatgtatttactgtagcgtccgaaacggtcgccgattacttcttctaacggtaaatcatgaaataattctggctgtgccactattaaacctcctcagcgaccgacaagttttcattttccaaaatattgctttcctcatctaatccgaaggcaacattcttttcaatccattttcttctcggttctactttgtctcccattaatgtcgttacacggcgctctacccgtgccgcatcgtcgatcttgactctgacgagcgttcgcgattcgggattcatcgtcgtttcccagagctggtctgcgttcatttctcccagacctttatagcgctggatggtatatcctttgccgactttctttaaaacgccgtccatttcttcgtcggaccaagcatattcaataatctctttcttgccgcttcctttgctcactttgtaaagaggcggaagggcgatgaaaacttttccgtgctcgattaaaggtttcatatagcggtagaaaaacgttaacagcaagacttgaatgtgcgcgccgtcggtatccgcgtccgtcatgatgatgatcttgtcatagttgatgtcctctatatcaaaatctgcgccgacaccgccgccgatcgcatgaataatcgtattgatttcttcatttttgaagatgtctgcaagctttgctttctctgtgttgatgacctttccgcgaaggggcagcacggcttggaatttccggtctcttccctgttttgcagagcctccagcagagtctccctccaccagatacaattcattcttcgccggatttctggaaccggccggtgtgagttttccgctcagcgtcgcttctgattttttgcgctttttgccgcttctcgcttcttctctcgctttacgggccgcttcacgggcctggcttgctttaatcgcttttttgacaagcagggttgccgtatcgcggttttcttccaagaaataagcaagattctcagaaatgacggcatccgcggcggatctcgcctcacttgtgccgagcttccctttcgtctggccttcaaattgcagcagttcctccgggatacggacggaaatgattgcggacaaaccttccctgatatcggcgccttcaaggttcttgtctttctcttttaaaagggcgacctttcgcgcatactcgttaaacgctcttgtcattgccgttttggctcctgattcgtgggtgccgccgtcctttgttctgacgttattaacgaatgacagcatattttctgaatacccgtcattaaactgaaacgcgaaatcgacttcaatgtcatgatgctcgccttcaaaggacaccacttcgcataaagcgtctttttcctcgtttaaataagcgacaaatgcttcaattccgttctcataataaaatacttcttttacgcctttccgttcatcaattaattctattttcaaaccttttaacaagaaagccgattcgcgcagacgttctgacagcgtgtcaaaattataaaccgttgagctgaacattgacggatcaggtttaaaatgggtaagcgttcccgtttttttggtcgttccgattttttcaagtgaagtcacgggcttgccgccgttttcaaaccgctgtttatagacatatccgtcacgctcaatagtaactgtcagccactccgataatgcgtttacgacagatgcgccgacaccatgcagaccgccgcttgttttatagccgccctgtccgaatttccccccggcatgcagcacggtgaaaataacttccggcgtcggctttccgagcttatgcatcccggtcggcattccgcgtcctctatcctgaacggagatgctgttgtccttatgtatcgttacgataatatgatctccgtagccggcaagaacttcatcgacggaattgtcgacgatctcatataccagatggtgcaggccgcgtgcgtccgtcgaaccgatgtacattcccggtcgttttctgacggcttccaggccttcaagcacctgtatggcatcttcgttgtaatcaaattgctgttttctagccaaacgtacaaacccctttcaaaaaacctgctcttaatcattctcttttttaaatgttttcatgtctttgtttttcagtatgcgcaagcttcggtccaattctcctcggactcacaattataaccaatatgcttgatttcgcaacatatttaagcgaatggctcgttttttaggccgcaagacatacattcgaacggcttttcatctttttggtgcccttttcggcagataagaacatgagttcgctttctattatatagctttatgccggccatcgcaaacagactgcaaacccctgtataaaggggtttctaaaaaagctgttcatgctttattgtatctgtttcatcatcatacgcaaagagtattctttcaataaaaaagcaaaaacccctgatttgccaaggatttttgccttttttgttcctattttataacagcgcgggcgacttttatacataaatccattacagccgtccgtcctttgtctgtaatcatgcgatacgcttcttcatttgcaaggccctgctgcgcccaaaaaacgggagcgtccgtctgtaaaaattcttcagcaacgccgggaagctgctcagagcgtctgaacacattcacgatatcaatcggtccctccacgtcttttaatgaagcaacggctttaacgccaagcgcctcatcaatcgttgggttgacgggaataatttcatacccttcatcctgcatcgctttggaaaccatgtaagaagtccggtcgggacgatctgacagcccgacgaccgcgatccgtttgctccggtccagaatttctttaatctctgattttgaaggattttgcatctttaccatctccttttgatatattgtacatgaccgcttcgccggaatcaaaaaaagcgatttgtcagcttaattctcaaaaaacttgtcatcagacggtaacaactcgtgttaaaatagagtgaagggacattgaaaaggagaaatgtagatgttgattgctttattgattattttggcctatgcaataggcagcatcccgtcaggtttagtcgtaggcaaacttgcgaaagggatcgatattagagaacacggaagcggcaatttgggcgctacaaatgcttttcgcacgcttggcgttaaagcgggatctgtcgtcgtcgcagccgatattttaaaaggcaccctggccgcggcgctcccatatttactgcacgtccccattcatcctcttctcgcaggggtggcagcagtgatcggccatgtattccccgtgttcgcaaagtttaagggaggcaaagccgtagccacatcagggggcgtcctgctgttttatgctccgctgttattcgttacgatggttgcagtatttttcgtatttttattccttacgaaatttgtttctctgtcttcaatgttaacagggatttatacgattatttactgtctgtttgtaaaagacccttatttattaatcgtagtgacgctcttgaccgcgtttgttatctacagacacagggcaaacatcaaacggattataaacaaaacagaaccgaagatcaaatggttttgatgaaacttcaattttgacatcaaaatgccatatgcgtttataatagagataatttctttatatgagaaacaaaaagggagtgttccggatgaacatgaaagtaacgaaaggcgcgctggattggtacaaagaagagctcgatctggaaacaggcgaccatgtccgtttctttgtccgttacgggggatgcagcaacgttcagaaaggcttttctctcggcattttaaaagacctgccgatgaacatcggcaccagcacggaagttgaaggcattaccttttttattgaagaaagcgacttatggtactttgataatcacgatttgtcagtcacatattcagatcaggcagaagagccggtatttgattacgtgtaaaaaaaagaacgcagcggatgcgttcttttttttacagcctgaacctttttaggtgatcagtcagacgttctttttctaatatgcttctttgcgtttctccgagcaggtcaaagtggggaaattcatttttatggtgaatccactccggcttcagcccgtactccgctccccatctgatcagtttattgagatcgcttgaaccggccttcgtcacggtcttagcctccggaaagcggtcgtccagccagtaatgcgttaaaaaagcgattttcccttccgatacatcctgcttccatctttccagttccttacgcgtaattccaaatgccataagtgcagccgctccttatttttttgccttttcgtaagcggcatgccaatcaggaaaagccttgcgaaactgaatcggtttgaagctctctttatcaacgcatatatgagaggatgtcgctttgatggcaagttcttgatccggattatagatgtggtagccgtaaacggttttaaatccgttatattcttcaatccaagtatgtacgacagccgtttcaccgtagcggagcggctttttataagaaatgctgatatccaatacaggggacagcactcctctatcttccatatccttgtaaaggaatccgagttccttaatcagcgccgttctgccgacctccatccagactaagtaattggcatgatagacgatgcccatttgatctgtttccgcataacgcacttctatttctttttttgacacatgcaacgttctctgctccctttttatcagattagccccattttatcacaacgagccggaaagagaaaaaaaccaggtttccctggtttttattatgattgatagccgttttctcttgcagccgattcatcctgaatttcactgcggaacgattcaatgctttcattgcgtctggcattcttttcttgaatgcgctgtttttcctcatctgtcgcaaattccattgattctttcgcttcttctatattttcaattgtattctgcaccatatcctgcagcttttcaacgttatcggaacggtcatccggattcggtttttgatcattgtttgtcataatgtctgctctcctttgatgatgttattcgcctttcgtctgcatgacaatcggatgtccgtttgacttgtcatgaaacttttcccctttgttgcgtttatatttaacgggttttgtccctaagtggctcggagcgtattgcggctggccgtctttcttgtttatgcccatgttcatccctccttaagagtatattttgcaaaaggaggtgcaaacatgactgcaaattaaaggttatttttgtttgaaccgctgctccagcttttcttcaagctgattcaaatattccgtattggtcatcagctcacgtttattttccataaccaattcatgaaaagaacgttttcgcatttttttcaatcttctcacctccgtgttttcattcattttttccaatttttcaaaacctaagcccttcacaataaaaaaactgaacctctatttgagatccagtttttctttcatttctttttttgtcatcgtgcctacgcgaatgtgctgaatggttcctttttcgtctaatatgtatgttgtcggataagaaagcacgttgaaatccccgttaattccgcttttgtcaatcagaataggaaaggtcagctgataatgatcagcaaatgatttcacagcctgtatatttttttcagaagacgtaaaattaacggctgctaccgcaatatcaggatattctttctgcagctcctgcatatccggcatttccattcggcacggcttgcaccacgtcgcccagaaattgaggagcactttttttcctttataatcagatagggagatactttttcctgacaatgtatcaagtgtaaagtcaggggctttcatcccttcttctgtcccttctttcggacttttttgcacggaataaatgttccagcccgcatatactaacaacccgataagtaacattccgcccagccatttcgcaagcatcttaagcctcccgcataaaaagagagaaagcagactgctttctctcttttgttcattctgctactgtttcattttatcgcgaagcaccatttgtaaaatgccgccgtggcgatagtaatcaatttccacttcactgtcaaaacggacaacgacttcaaacgtttttaccgtaccgtcttcactgattgctctgacagtcagcaagtcgcgcggacgtacagattcatcaacatccacctcgatgacttccttaccggttaagccgagtgtatccgcgttttcgccctgtttgaactggagcggcagcacacccatgaagacgaggttgcttctgtgaattctttcaaagctttcggcaatgactgttctgatgccgagcaggtttgttccttttgcagcccagtcacgtgaagagcccattccgtaatcttttccggccaggacgacaagacccgttttatcttctttataccgcatgcaggcatcataaatagatgtcacttccccggtaggccaatgtgttgtgtagccgccttctgtacccggtgcgatttggtttttaatgcggatattggcgaatgttcctctcatcatgacttcatggtttccgcggcgtgagccgtaagagttaaagtcacgaggagaaacgcctttttcctgcaggtatttgcccgccggtgtgtcttttccgatcgctccggccggagaaatatggtcagtcgtcacggaatcgccgaatttgccgacaacgcgaagtcctcttaaaggctcaacttttcccggctctacagacatttcctcaaagaatggcgggttttgaatgtaagtggaatcctggtcccacttatacagcgcttcatccgtcgtttcgatttcgttccagcgctggttgtcgtcaaataccgtttcatactctttgcggaataattccggcgtaacagtctgtttgacgagagaattgatttcatccatggacggccagatgtcatcgaaataaacattttgtccgtcatttccgacgccgatcggatccgttttcaggttgatgtttacagttcccgccaatgcgtatgcgacaacaagcggcggtgacgcaaggtagtttcctttgacaagcgggtggatccggccttcaaagtttctgttacccgacaggacagaagtgatcaggaggtcatttttagcaaccgcttcttcaatctctggagaaagcgggccggagttcccgatacatgtcgtacagccataccccacaaggttaaagccgagctccttcatgtaaggaagcagacctgagttgactaagtatccagtaacaaccttagaccccggtgcaagtgaagtcttcacataattcggcactttcaagcctaattctaccgcttttttggctaccaatccggcaccgattaatacataagggtttgatgtattcgtacagcttgtaatagcggcgattgcaatcgcccctgttttcataaccgcatcttcaccgctgttaagtttaaatgaaatttctttgttctcttcagcagcatccgctccgaatccttggttgccggccgggctgacaagatgttttttaaacgtttcctgcataacggaaagcgggattaaatcctgcggacgtttcgggcctgaaaggttcgcttcgatttttgacagatcaatttccacaacgtctgtaaaaatcggctcttccgcgtcaggcgtatagaataaaccgttgctgcggcagtatgcttccacaatatcgatctgctcttcttcacggccggtcagacgcaggtaagaaagtgcttcctcgtcaaccgggaagaatccgcaagtcgctccgtattccggcgccatattggcaatagtcgcccgatccgcaagcggaagctcagcaacaccaggaccgaagaattcaacaaatttattgactacgcctttttcacgcagcacttgagtgactttcagcgccaagtcagtcgccgtcgttccgttaggcaattttccgacaagtttcgcgccgatgacctcaggaacagggaaatatgaaggctggccgagcattcccgcttccgcttcaataccgccgacaccccagccgaggacgccgattccgttaatcattgttgtatgggaatcagttcccaccaaagtatcaggataggtcacaagttctccgtcttcctctttcgtatggacaacgcttgccaaaaactcaaggtttacctggtgaacgatacctgttgcaggcggaacggcctgataattgttaaacgctttctttgcccagcttaaaaatttataacgttctgcatttctttcgaattctaagtccatattaatggctaacgcatcttccgtaccggctttgtcaacttgtacggagtggtcaatgaccaggtcaaccggaatttcaggattgattttatcagggtctccgccgacagaggccatggcttttcttaaagatgccaggtcaactacggccggaacgccggtaaagtcctgcagaataacccgtgacggtttaaacggcacatcgatatcttttaattcagcagtaccccatcttgctaaattttcaacatgctcttttgtaatgacgcgtccgtctacctgacgcaaaacggattccaaaagaaccttaatagaataaggaagttttgaaacattgccgacccctgcgtcttccaatgcttttaatgaatagtagttgtatgttttcccatttgaagaaaatgtttttcttgcttggaaaacgtcttgtgttgcgactttttgctgatttgtcattctccaaaatcccccttcaatgatcaagatcgttctttagatgaatgttcacattccatcacaattttctcacaatttcatcttagtataaaatcatacataagtaaatatcaatgtttttattaaatacaataagatcgtcttatcagcatattttcggtaaattttgtccgattttccgcctcatacaacgggctgtaaagagccatattaatgttgaggtgatgatcatggtaaaacggaaagccaatcatgtaattaacggcatgaatgatgcgaaaagccaaggcaaaggcgcgggttatatagaaaatgaccagctcgtcctgacggaagaagaacggcagaacaataaaaaaagaaaaacaaaccaatagccggaacaccttaaaaaggaggctttaacatgacaaataaaaatacgagtaaagatatgcataaaaatgctccgaagggccataaccccggccagccggaaccgctgagcggaagcaaaaaagtgaaaaaccgcaaccatacaagacaaaaacataatacaagccacgatatgtaaaacagaccccggtgtctgtttttttgtgccattcacccatttaaagcttctgcatacgttatagcaaggctttttaatatggaggaatgcttccatgaatcactcaaaaaacgctgaagaatttgatgatacggaagaatggctgcggcagttttacgaggacccgtatgcttggtatgacgagacgctgccgatcgatctatatgaaacaagccgtcagtatatcattgaagccgacctgacggccctgaagcaggtgcaggcgatcaccgtcactctttcgggaaatgagtttatgctctctgttaaaacgcttgaacggacattaaacaaacaaatggtgcttcctttttatctgaatgacaaacatattttcactgatttcaccaaccatattctgaccgtctccatgaacaaggagcctaatgagactcctgcctcattttcctttcaatttcctctataacataaaaaagccgctttcatccctcaatggaagcggcttttttgtccggtcatatcagtcatataccctcaaagtgaatctcccatggccaaatagcagaatcactatacgatagaatatgttctagcaaccgaattgactggacatctatcattttttctattctttttttcatgtgttcttctattctgtcttcgtttacaatatggttaaagtaaggaggagatagaacaatgctagaaggctggtttatgtggtttattttattttgggtcatcgtgatgatcggattgctgtctatcggcggattttttatgttccgaaaatttttaaaacgcttaccgaaagaagacggccggtcagaactggattggcaggactattatattgaaaaaagcaggcacttatggaatgcgggtgacaaggcgtttttggatgaattggtcgctcccgtgccggagctctttcgggatgtagccaaagcgaaaatcgccggaaaaatcggtgaactttccttagcggaggaagctgaacaaataaatcgtgatttaatcatcaggggttacatactggccactcctaagcgtgatcatcaatttttaaaaaagcatctccgcgaaaaacagattgatcttactccttatcaggccctgctcaaataaaaaacctttccggcggacggaaaggttttaattcatctgaatatcagcggtcttcagttcattcgaaagtttgcggtaagacataaacatcgcgatgcgccacggaacaatcattccgaaagccagaatccaaaacattccgcttaaagctccgtaatcaatcgtcgtgctcaaaatggatttcatagcgattctgataaccagcaaaccaatcaggataaacacaaacgcttttgaccgttttaaatagatttcattatttttaatctcaaatttagatgttttaatcagaaaaatagagaagatcacgcccagcgtaatggcctccaaaaattcttcgcccgtcactctgaaaatcggaaaaaggaacataagcgctcccgtactcatgaaaatcggcgggagaattatttttttaggtgaagcgggcttgtcggaggctttaatcctgacgatcatcacggaaatggccatggccgctgcaataacggatgaaattataatcatcatctttatcattcctttgcttgcacggagtttgatactatatactatactccaaaaacataaaaaaaaccaatttgaaaagagaacacgtttacgttcccgttacccggcctacggcctccagcactttagatgcttcaaacggtttaacgataaagtctttagcgcctaattcaatcgcttccagaacgatccgctgctgccgcatggcggtgcacatgatgatccgggctttcgggtcaaaagctaaaatatcctgcagcgcctgtataccgtttttgaccggcatggtaatatccattgtcaccaggtcgggacggattttttgatatactgccagggcttcctcgccgtcagccgcttctccggccactgtgtaattcgccgtttccagaatctctctgattttcgccctcatgaacttggcgtcatctacaactaaaactcgtgtcatattcccctccacatatttaacattaactagtcttattgtaccaaaaacgaaagggtatataatagttcaaaagttattaatccgttacagacccgtaaatcctccgaaaagatttgacagaacgatcagaatgtagctcatccagttaaaaaacagcataactccgatcagaatcataagaatgccgccgattttcatgataagcagctgatgcttgcgaatccaattcattctggtaataaaaaatgaaagaacaagaaaaggaatcgcaaaaccgagaacatataaaaacatatacggcactgctgaagaaggatttgtatttgccagcgaaaacacggctcctaaaataggcccgctgcacggcgaccagccggctgcaaacgcaagaccgatcagaaccgaaccgataaacccctccggacggcgcttaaagtgaatgcgccgctctttcatcatgaatttcggctgaaacacaccggcagtaatcagcccgaaaagaatcagcatgatagcgccaaactggcggatcgcttcatgatattgggtaaaaaaactgccgataaacgaagttccatatcccaatgcgataaaaatcacggagaagccaagcaaaaaacaaagtgtatgcacgaggccacgcttttgcagcatcaccttttctgttttcacctcgtccatactgacaccagttatgtaagataaaaaggcggggtacaacggcagacagcatggagaaatgaaagacagaaatccggccccaaacgtcagaaagtaattaaaactcacgatgacacactcccttcgagttatgacaaaatcatttcatttttttaacactttcccgagaaggattactttttatagaaaaagcttatataatttaatttgacatcgagatattatactccttcttatttgaaaaacagtataaatgtggatataataatagcgactcaggtgaaagatttatgtatgaaaggatatatccctgtgattagagagcatctattaaatgaaattgaaaaaaaacgggcagagctgcttaaaatcgtcatgacaaacggaatgacatcaaacattacgatagaactcagccaggagcttgaccaccttctcatacaataccaaaaagaactgcacaccggcagttggggtgaaacatgacgcaaaaataaaaaaccctctccgggttttttatttttataaccatgtatctctatatcataatctgtacgtattatttcgcttgattattcatggctttcatcatttgattaattttcttttgagaaggtttcattcccatttgcatcatcatcatgcgtaacatttgttcattaataggcggattctttttcaaatagctcatcatatatttacgagcaataaaaaacccgagtgcaacacctatgagcaatgcgacaacgcccactaggatgccaacccataaagtcattttatttcctccttcatgttgtctagtttaaagtgtactaaaccaaaggctattatacaacatttacatctctttttcctcgtttttagacaaaatttctttccctgaccggatttaaccacccgtagcgccgtgtcttgaaatccattgcaagaaaacaggggctgattttacgcagaatctcaaagaaaatcgtttccgcctcataatctcccgaagccgcaatctcaattaaactgtctttcatcatgaaggtggcgcggcccttttctccgggcagtgtaagccggtaaatggaatccaaacggctgtaactcattcggtttaaatgcagctggagccgctgatgcatatgtatcaccggaatcggttccgttatatattgaacttgcttttctgtcatttgatattcctggggtgtcagatctgtccaatgatagtctcgaaacaactcaaacatagccgtttcccgcccgaagtagtggttcgcaaactcatcctttatcaggtgcgtatagtaatgacgttccatttcctcatccccttttacagcgcttcgttattgctttctattatacaaaaggagaaaagaaagaattgtctattactgttacgccgccccttctatttttgtcgcataaacaggaaaaagaggatgatttgactcatcctcttttgtctcgttatttgtttagaagttttttcacgcggtcaactacgttttctgcagtaaacccgtattctttcataattgtttctcccggagctgaagcaccgaaacggtcaattgcgagaacgtctccttcaagaccggtaaatttgccccatccgaagcttgaacccatttcgatcgcaagacgtttcgtcacattcggaggaagcacgctgtttttgtactcagccgattgtttttcaaagcggtcccagctcggcatgctgactacagatacgtgaatgttttcttcagccagtttcgcttgagcttcgatcgcaagtccgacttcagagcctgtcgctaaaagaagggcgtccggtgaatcggtttttgctttggaaacggtataagcccctttttccacgcccgcatacgcttcttcagcctgctgatcaatcgtcggcaggttttggcgtgtcaatacaagagctgtcggatgatcttggctttgaacggcaaccttccatgcagctgcggtttcatttccgtcagcaggtctgatcacagaaaggttaggaagtgcgcgtaaagaagcaagctgctcaatcggttcgtgagtcggcccgtcttctcctacggcaatactgtcatgcgtgaatacataagtgacagggagtcccatcaatgatgccagacgaatggcaggtcttaaataatcagagaatacaaagaatgtgccgccgaatacgcggaggccgccgtgaagcgccattccgtttaatgcagcgcccatcgcaaattcacggacaccgaaccagaagtttttcccggcgtagtctttggccgtgaagtctcctccatttttgattgtcgttttatttgaacccgcaaggtcagcagatcccccgacaaagaaaggaattttcttggcgatcccgttcagtacctcacctgaagatgcgcgggaagcaaggctgctgcctttttcataaacgggaacttcctgatcccagtctttaggaagctcgcctttcatgccgagtgacagctgttcagcaagctcaggatatttttctttataagccgcgaacagttcattccattcctgttcttttttcgagccggcttcttttacagcttgattgaaatgcccgtatacttcttccggaacataaaaatcttcttcaaacgtccaagcatacgcttcttttgtcagcttgctctcttctagtcctaacggagcgccgtgaacgccggatgtgcccgcacggtttggagaaccgaaaccgatcgtggttttcacttcaatcaaagtcggttttttatcattctggcgcgctttttcaattgcagccgtcaattcagcgatgttgtttccgtcctcaacataaagaacttcccagttcattgcttcaaaacgctgctttacattttcagagaaagatcggtctaaatcgccgtctaaggaaatgtcattagaatcgtataatacgatcaggcggcctaattcaagatggcctgcaagagaagcggcttcggaagaaatgccttccattaaatcgccgtctccgcaaatactgtatgtataatgatcaactacgttgaatgaatcacggttatatgtctcagccagatggcgttctgcaattgccattcccactgccattgcaatcccctgtccaagcggcccggtcgttgcgtctactccggctgtatgcccgaactccggatgtcccggtgttttgcttccccattgacggaactgtttcaagtcttcaatgctgaggtcatatccgcttaaatgcagcatgctgtataaaagcattgaaccgtggcctgctgataaaacaaagcggtcgcggttaaaccagcccggattctgcggatttacattcataaatttcgtccacagcgtgtatgccatcggagcggctcccatcggcatgcccggatgtccggaattcgctttttcaattgcgtctatagatagtgtacgaatggtggcaactgatttcttttcaattgtatccattataatccccttccttattgttgtaccttttcatcataaagcgatgctgactttttctcaactctttcagcttaaatttgagataaacttgttgaaaattgtcgtaaagcacatcctgatattagtatatacgaaaaaagaatacgtattgccgtattctttctgtttagtgaagattatttttctgttgttctctttttaatttttcaggggtgacatcgttgccttccggatcaatcacttttacgctctttaacgtatttttcattgaggagcggaatcctttcaaatactcctggcgaagcttttgctgttcagctttttcctcatccgttattgtgtttgatttagctttttgagccaattcgttaattcttgcgattttttctttagaaatcataataagctcctttggtgcgtgttgattatatactactaaaacgcagtcttttttacaactgatgcgcgtcagctgccttctgtgtctgcggtatattcctgaaaccgccggtgaaccgtggctttggacacgtcatagccgaatcctcttaaggtcgctgcgatttctgcaaaggtaagcttgttggctctcagcctgataatttccgaaaccggaacctcttttttttcttttccgctgttttcatgtctgtttttcagattccgttcaggcttgtagccgtttttcacggctcttttcattccccgccggattttcatattgtgaattttcctctgatattcctcaacaatactgacgatttcaagtaccatcgaatcagcttcggaaagctccagttcacctttatgagccgtcgtatatattttaacgttctccctgtaaatacaatgcaaaagcgcaatcttggcgtttcctcttcccaatctcgtttcgtcctgcaccaatatcgcgtcaatatgtgattttttaatttcatcaagcatttcaaatactccgtcgcggtccatttcgtaaccgctggctttctcagaaatgactttcacgacttccatgccgtttgcagcagcgatctcactgagctcctcttcctgtctttttaatgacgtttgctgctgttctttgtttgtgcttacgcgggcataaatgagcgccttcatttctctctttcctctctaattgacaatggccagctgatatacggccggatgcttcttcttaaccggtagaataagttcgtctccgggctttatatcagcagtctggagatgattattctccgtcacccactcaatgaaatcttctttattaatgtgtttcttttctgctacatgatctgcaagtgaccagagtgtatcgccgtcctgaacctttattttaacatattggctgagggactgatcatttcccgcacatgaaacaagtaaaatagcggcacttaaaatcgcagtaaacagcccgacaaatatgatagattctttcgccatgtaaacaacctccgataagaatgtttgttcgctttttatatctttcagtatatacgaacaaatgtttctgtcaatcgtttttttcgaacctatgtttgtactgtcaggaaaatcatgctataatctacttaaaatcgacgttttgaggtgcgaaatatgacgaagctatcaaaaaggcagcttgatatcctgcgttttattaaagaagaggtaaaaacgaaaggatatccgccttctgtaagagagataggagaagcagtaggactggcttccagttcaaccgtgcacggccatttggcgcggctggagacaaaaggcctgatcagacgggaccctacgaaaccgagggcgattgaggtattggatgaagaagaagtccatattccgaaaagccaggtcgtaaacgttccggtcatcgggaaagtgacggcgggtattccgattacggctgttgaaaatatcgacgagtattttccgcttcctgaccggatggttcctccgggcgaacatgtctttatgttagaaatcatgggagaaagtatgattgacgccggcatttttgacaaagattacgtcattgtcaaacagcagaacacggccaataacggagaaatcgtcgtagctatgaccgaagatgatgaagcgacggtcaagcgcttctataaagaagacaattatgtgcggctgcagccggaaaatccgacgatggagccgattatcctgcaaaacgtaagcattttggggaaagtgatcggcgtattcagagccgtccattaattctattaaacttcatttatcgtaaaaaacccctctgtaaggggtttttttgcataaaaaaagcagattcgccctggcttaagaaacgaacctgctaaggaggaaaaacttacattcttattatccgacatcgcacttttgaagtcaactaataatgtttccctcgagaaacttttcattcatttttcaactttttatatatttgtgcgtgatgaatttgcttttttatcttttctttgggcgggcacgtcaaaaaatttatatatgaatatttagtacatagtgcaataagttaaatataaatataaaaaaacccgctgcctttagcgagtatctattttcaatcaaaatgataatattctacaccgtagaaccctttaatatagacgggaccacagacgtttgaagaactttcaaccagaatcctgtatttgtgatacggatcaattgattttttatcttgggcactgaggtttaaccagctgccgctgtagtttttagaacttaatgtataaaaatttccgttcagcgccatccgctggagtttcatgcttaaaccgcacgaagagttgttcattatggtgaacttatagcctaaaaagtaatcgtcggcagctacagcacccggattttcaatatgaaactcttttgcgtttccctccaaagtgaagcttgtttttgatccgaattcagtggtagccgctttagctgagtgtattccgctaaaacataataaaaaaacagcaatacatatccagtattttttcatttgcatccccctttttacatattttaacttgtgaatcctgtgatgtctattcacattttactttataaccactatatacctgtttaaaaatttgcggattgcttacaatgaagactaaacgaaataacgaaggtggttcaaatgaaacacgtaattgctttcgcttctaaaacggcgctcacacttgctttactgtacattgttctggatcttatgtaccaagtaacctttttaaacgttctgtttattacagtgatcttaagtttaatcacttattttgcgggtgattgcatgattctgccgagaacaagcaatttcacagccgttgcagctgatttcggaatttcattcattatattatggatattcctgatgaacattggcgggtttaatgtctctcctgccgcggcagcggttatctctgcactttgcatttctgtttttgaggcattttttcaccggtatttgcagcaatatgtacttcccgaagattataaggacacaacagagacggatagcacgctatggagctatcaaaccgaggcgtctgaagaattagtgccggaaaaagaccctcaggaaaaaacataaaaaggaggcaatcgcctcctcctctttttacttttgcttctgatcgtcaagcggcagctgcagcagtgagtctgtgcctgtcgctttcggcgtttttccgtcccatttttcaatccatttatatttgatcatttcatcggacattgatttcttaatgatttcgttatagtcagcgatcccttccgcttcaatttttttctttttcgcttcggcttcggctattttaatttcagtttgtgtccgttcaagttcctgtgaagacttcacccttgcatcgatggcttcctgtgtggctttatccggcttcggtacgccaagcgtcagatcatcaattaaaaatccgagactcttcatatcatcagcaaatctcttttgaacatcggccgcggcttcagcagatttttgcccgtatgtgtcaataaccgagtatttgctgattgattttcgcgccgcatcccacagccttgtttttaaatatgtattttcaatcgtttcgacgtctaccgccccgaatttgttaaacagatcgactactttatcaggctgcacgacatagttgtaagcgatatccatttctatatttttaccatcagaggttgccacttttatattttcattattcactgtctgcatacgcaccggatattccgttactttattaaataatccgactaagtgccagccttggtccaatgtgtcggattttaccccgccattcggtgagtatacaaccccgacataaccgttcggtattttttcaatgaatagtgacgctgtgacgcccgcaattaaaagggctgcacctataatcacaccgccgagaattttttttgtgtttccgcgcttattttcgctcatgctgatcttcttcctcccatgacttttttaattttttggctccgcttcccacttgtttaaagattggactaagcatcagccataaaccgaatccgatgatgacaagaagaatgatagacccgatcatcactttcatttgcccacctcttttctttcatcctgtcaattatgtatacgatcttaagaacttaaagtttcataaatttcaaaagaaaaagccccgccgacaaaataagcgtgcttattaataattgtcactgataaaatcagaaatcgtttttgtaaattggtaaaaggtcccgttttgtgcggatgctctgcttttcagcgtaaaggtgtcaaatagtgattttctgaagccggtgctcatttcgatttgaatactcaatccggatgaagattgattggcaaggttgttcggactgacgcctgcgtatttatcatttgtgccaagaagaacggcaggatacccgtgccgtttcagcacatcggtcaagagttcggcccgttctctgtctgtaccgccgatttttatctttttatcatcactgccgtaaccgtgcaatgaaatgacattagagtgccctttcaccatttgcacggccttggtttcatcgaaatgcgaacttgtcaaatgcagagctgcattaccggctgattttaacccttcaaataaatataaactccggttttcggcaatttctctggctaactcactggtccccggctctatgcctccgccgtgtatagctaatatgaggacagaagggtcatgctcccgcgttgaaatggaaaaatcggaaggatcttcattcagctttaattcctcgaaactgccgtaaagatctgaagcggcatcagcccgaaagaacggcagaagcaaaaacggtaaaattaaaattgaaattccttttttggttattgatggcatttgtatgtttatgttacaatacaaatgcttcagcctttgaagcgaacggcagaacagggtgactttggacggtttcttctgctctgcctctttgccggctgctttacggtctactcttctaaccctttttgccataacatcatcctttcttttgtttacacttttgtcacaatattatatacgttggacaaaacctccgttcatcttgaagaataaaaacatcaaaacaacctctatcctttagcctaaaaaagtctttctgttcaaagagacggaaagcttaaatgataaaaatgaaacccgtctccttagttttgtttgatttcccaattcaagaatccccgaaaaaatttgaatgtaactgctgtctccataaaaaaaagactgctgttaagcagtctttttttcgttttatttcgtgcctgttgatcccagtccgccgcggtcattgttcccgagcttgtctacttcgatcagctccacttcaggcattttcttcatgattctgaattggcatatccgctcccccttggaaatgtcggtatcccgaagcgcgaatgcaggaaaaaaccagaagtcattgtcgcctttataagattcatcaatgactcccattgaatttgtctgaatgatcccgaaatgcttatatgtacttgaacgcggaacgacatgggcctcgtatccttccggcagttccatcgcaactccaagcgggataagtttgaattcgccttttttgattgttatatgttcagctgcccgcagatcaatccaatcgccctgttcaattttactgattctcgtttgcgtatcatctgaatatttaattttgatttgtaaagtcatgttcgctgctccttttgcttccctatttcagtcgtattgatgaccaatccgtgccccattataccatttaactgataagaatgctgattttggtgtatatgcagccgaagaggaagcacggcgaagacaatgagaataaacctaaaatgaggacccctcctatcagtttttccctccattttcacatgacagcttcaattacaataatgcaaagctatatgtccgttcctttcaacagagcttttttaaaatttcgcctcggtttcaaaaggaatttcgttctgaataaagaatttgaagaataagcgcttaaagggcgcgcgattcttttctgtcccctgcctcaggcgcttatatcaaaagaaagaggtgtctttagaatggttcaatttaaaaactttcctgatccgtctttaaacgccccattgcagtctcgccctgcacagccctctgaattggagcatctcaaagcaaggatgcagaattttattaagcattccgcaacggatgataatcttgagatcgcagatgcccgggtgacggcggaaggaatggtcacctcacttttaaaagaacggcttgatacagaatacgaaatgcttatgaataaaatcacccgggaagtgaatgtggaggattacggagcggtccctgacggccgggacaatacagaagcctttcggaatgcgatcgggaacggccgggtcaaagtaaatgttcccgcaggagaatttttggttcaagggataaaactcccctcatggactactatttccggtgagggacaagggattaccgtgcttaagcttcatgaggacactcccgcatacgaatgggtcattactaacgatgattacgaaaatggaaaccgtaatatttttgtccagaacatgactttagactggaatcctgaccgtcaatgcggagtcaggaaccccggaggacagtgttccagctgtttaacgtttgctaatgtgcaatacggctggattaagaatgttgaaacggttaacgcgggtctgcatggtatagatattacatctccgacttacgatcatttgcctgaaacagaatggacgaaagacggctgccgttatatatggattgataactgtgtggcatacggcgccggagacgacggcattaccacccattacagcgaatatattttcatttccaactgccattccggaaacccccgcggcacagagcatgctgagggcagcgcaaactcgaacggcattgaaattgacgacggctctaaacatgtgtggcttttaaataactatacgagcggaaatatccgcgggattgaggtaaaggcgcacagcctgtggccggcttctcaaaatgttcatattatcggtcatgtttcgtatcgtgatgtacgttcatttgatattcgtcatatcggccatcatcaggcctcagaccccgaaagcacgacggcttatgatgttactttaaccgattgcaccgcgattgaaccggtattcaatgccctctatgacggtgtaaccccgagggcgctggtcatctctgcctataaaaacgttaatgtaaacggattcacagctattggtgatccctcatacgactatggcgggaatccagtcgtggctcttcaataccgcagtcaaaatattacgatcaacggcattaaaatacgcggctttacacaagccggggttgacatcaatatatccggcggatctaataaaaccgattatgttaaaattttaaattttgatatatacaagtcttctcctaaaggcatcacaatcggcggaggccaatataacgtaaatattatgaacggtacgatgatcggagacggcggttccgtcggaattacgtcccctaacagtcaggctgtcattctcggggtgcaagcggaaggttacagcgctgccgcatctataaaaggacagacttatgagcagatccccgtcaatttaaagggaggcgcacagctcgcgaccagctccggttttgcattcaacccgacaagcgccgttattgcgggaacaggcgatattacggccagaggtgacagaaatgcgatcatcagctcttccggaggttcaagttccgaaggttcaagggcatttatcgccgcttcaaacaatgtccatattacgggcggcaaagtctccagaacgattctgtcatcagaaagcattacattggaagaaccatacacggttgccggagggcatcagtccatcaaatggaaactggattcagcgggcggccacggtacgttcgccggagctgtcacctcttccctgtcagggtacggagaatattttgaaagtgtaaccggccagaagattcccgccgggacgatcgtcacagtgaaaggcgaaaaaattgaaccggctcacgtcggtgattatatgctcggcgtcatttcagaaacagccgcttttatctcaggagccgcaagcttcggatggcaaagccgctttttgacaaatgagttcggcggtttcatatacgaaaatgtgactgacgaagaaacaggagaaacagtacgcgtaccgaaacaaaacccggactgcagtccggctcttgaagctgactatgaagcacgcgcggccagagacgaatggcatattgtcggactcaacggccggcattacgtacgagtcgacagtacggtcagcccgggagattatatcacggctcataacggaatcgggactaaagccgcggaaggctggaaggtattgaaactgacggccttatacagcgctgaaaaagggtacggcattgcaattgcggttatcaaataggatctcaatatcaggatcatcttctctcttttctatcgggcgggtataatcctgttttttataccgaatgagatgcctctttttcagcataccgtttcatttgtccaagccatccatgctttctgtcatagaatactaccgtcagatgaaaaaaggaggaatatgagtatgagtatggacatgggtatggacatgggtatggatatgaacggacattatgatcaccagccaaagcagcctaaacaaaagaagaaaaagaagaaacaagataaaaagcatcttgattatgattacatcgttgtttataaaagaaaatgcaaaaaatgctgctgacttgacatatcaatactttttacacccggtaaatcccgggtgtttttcttattatgacgtttctccgggctattttcacccaaaatccggtcatcctatcacaatacataaaaagactctattattttcttcccttttcgcctgattaaaagtatttcatttacagaaaacaacataaatagaatgacatgacttttgagaaaatctgctctttgcttggtcaatttttctgcgataccatgaatttgcaacaattttaaaaaatttcctcaggaggtcatagacatgaaaatcgccagaacaatagtcggatcatgcttagctttatctctaacaattcctttcacagccagtgcctcagcagccagtcagtctgaacacccgaatgcgcctcacgtttcacccgttgcaaatccgttagaaagtaaattatcccaaacagcaggccaaaacgtaaaagcagcaggtgttgatgccgggctgaacgtaaacgtagatgttctcggaatcgcagatcgcatagctgaagcagttaagtcagatcaaaaccgaaccggctgggtaaaaaatgtcatggaaacaacattttacgcatcaggacagaagtacaacgtcatggtgttcaatttaaatcaagaatatgaagaccgctttaacggcgttcaattttacggatcagccgtttatgacggcattacttacggaatctgggtcttcgaagacggttcctttaataacaaaggagacgggggctggatcaattgggcattcagaggatggttcgatcgtgataatcagcatattgaattccacagaccttaattcagagaaaacttgcggcagcgcccgcaagtttttattttgataacgggatactgtacatttttcaccgttataacgactatacttgaagtgcgggctccgatcgcagccccggtaaagtctttcaaagtgagggtatgccatgtcaaagtctttaaaaatagtgttgtggagcatattggttttcattatcttgttagtgatgatcggaatcgtttcttacaatcaaactccgtctgcagaaagcgcagcaaaaagaatgctttacagcgtctaatcaattttaagccttcatcggctttttttatttaccgcagaacacttgaagttcttctgttagatcgttacgttcccattcggaatggagtatacgcgtatatcaccaggcagtccgttttgatacatggttccgattatgcctttcgcatcttttttctctattcctcatcacatccacttttttcatgctgctgctcttgaaaccaaccaatcatttcttcagcctgttccgttgaatcaaaaggttccaatcctaatagcgtgttacattttcatttttaaaaaaacaagccaactgcgcaccctcttcgcaacttctcaatgtatgagcctatccgtttctattacaggaagcagtacgattcctccttttactcattttaacggatggccatgtaaaggaaatatagactaagaaaccttttttcaaaaagtaaactagcatccctatcaaacttttcatttcggcatagtatgtattaatcctctttaggaggtgagattatatgggattctcaggtggttatggtagctcctttgcgttaatcgtggtgctattcattttattaatcatcgttggggcttctttcctcggcggttattaagaatcctcttacctccgcatccatgtcagcagcacctccatgatcgtacggcgccataaatgaaatgtttatggcgctctgctgtttttacccttttcattcacacattaaaactaaaaagatcggccgatgaacatgcagccgatcagtaattcatagattattgtgtaaggtttacatcgatgacgttatagaaggcattggaagtatccgcaacgtcccatacccccaaaatgacatgatacccgcttcgatcagtcggcacaaaaatcttatgagtcagattcgtatctgccttggaaccgtcgtggtttaccgttccgattaattcaaattcatctcttgacaaaggtttattcggattccagtttttcttggtgatataatagtgccactttgatgtcgcatgaggagctgtgtagtaccaagtaaaggtgttaaaaccgccgcggatgttttgttttacccaataatctgcagtctgcttgtctaaaccgaagtcaatttgtcccgatcccccatttgcagacgcaattcttccatccggcggacctgcagccggaaatcctttcggcccttctacagactgaggattatcaatgacggagccatatttctgcgcagcggccgtccagcccaatgtttgtttctctaaagctcccatgtacgctctgctgacgggctcttttatatacccgtgcgcagatgcatcacttgaatagaaagcgcctccaatcccaagagtaacagttaaaactgcagctttgaccaaacccttcattactgcatcatcctcccttttttgttaataaaatccctttcggtatatacacttcacgatagaggatgaaatgaccttccttttcttgataggaaaaagcaatgaggttcgcgctttcccctttgttttttataatcataaagaaaaagccgggccgattctgttgtcgaatccgcgattgccaaaaaccggcccgccccttatgctcagaacttcattcgctggatttgcgggtttcttttcggataaccggtgctacttccgctgctaatcgttcgatgttttccgcggcttttttaaacggcatacctcctatatcgatttgcgcgagaaatcgctgatgcccgaacaactcatattgatgcatgattttttcaatgatctgctgtgaacttcccacaaataaagctgtttcttttccggacgcccgctcaaaatctttcttcgttaaaggctcatcgatcccgtgatatgaatgaacgtgagaccagtaatttgaatgatacgggtaaaattcttgtattgcctgttcattcgtttttgaaatgaacatatgtccggtcacggcaaccttcacattttccggaggatgaccggctttagaagccgcttcccggtatttgtcaacaagcggcttagatgacatcggatcaccgctcagtacagccaatgccaaacccgcacctgcacgcccggctcgttctgcgctttccggagtccccgaaacacctaaccatagcggaatgcttccgcaaaaaggccgaggagaaatttctgcctcgcgcagcggcggccggtaacgtcctttccaggtaaccgattcttccccggaatttaattttaaaaaaaggtcaatgtgttcttcaaacagttctttataatggcctacgtcataaccgaaaagaggaaacgagtctaaaaatgcgccccgtcccgcaatgatttccgcccggccgtctgaaatcagatcaagcgttgcaaaatcctcaaataaacggacgggatctgcggtggataatacagtcgtggcactggtcagcttaatattttcagtaatctgtgaaatcgctgataagatggccggcggcgaagataccgcataatcaagacgatgatgctcgcctaccccgaatacatcaagccctgcgtcgtcagccagtttcgccagcttcatcaattcatctatccgctgctttgcgctgactgttttccctgtcagaggatcgggatataattctgcaaatgaataaattccaatttccatacaatcacggtgttcagccctcacatttctctcctcctgcactgtgtaaaaaagcttttatgttattctattcagccgttttataaataggaatttattcaaaataaatacagaagcttaacatgcagaaggccggtatgagaggaaaaaaagtttccggcgcccttcaattctgcccattatactcatgcagccggactaggcaagaacaaagccggcacaagcggattcgaattcatgtgttcgttttcagtccaattcaatccaatcgtgatattgatcataaagctttcctattcttccggcatcaagagcgatgacttcacaccctctgtcatcatatagaaagaaaataatatcttttgtcatattcacaaagaaaacatcgggatacccaacggaacagcccccgaaccttggcttcagcggaaaatcttcgtggacggctgccttaagtaattggggaatacgcagatctttccgtttacataataaagaaaactgctgcatttcatattcttctgcatcatcttcttcaaacggacaggggcaggtcttcacctggatccgatataaatcatccttacacttcagaaacggctgataaacctttaattttctcggatgattaccttgagttttgtgcttatatacgttggcaacaaggaacatgtcatcgctatgttcaaacagttcattgaaaagtgcggcggtttgatgatgaacaagctgaaaatactcaagattcaaagcaccgctttcattaaattgatacatattgccgccgagagaaaaatgaagtcccacgtcccattgatgataaatgccgggcactaattttaaagtcggaaacctttccttcagataatcatttattttcattcaaacatctcactttccgtttcccgctccagagacagaagaagccgaaaacattccgcttatttctttttcacccttgtaatattattccgattggaatacaatgaaatagaacactgtgaaccccattgatcagggtggatgctggtcacattcatcctggtcctttcttttacacaagatcgcaccaactttgatcccctccgtttccaaccttatacatatatttcaatggtattattttcttatacataagcatcaagaggtgtcagctttgaacaacatcagaagatgaagagcatatttccggtctcaccgcaaaatgggtcttgactctgaactgcttttcacattttgattatcaagcgcttctttaaattcatcaaaatgaattgaacattgctgattcaaattacttcctgcaccttctgtcgctaaactgcaaaatgtccgtcacaatcatcctctctctaattttacaacattgctataatgattttcatgtttttcccaaccttcaagctgaatctttttgatcgttactaggtaacctaaatacaaaaaaacctgctttcagcagggttttttcggtaaaggggagattatttccccacaaattctattacctatgtttttgttttaaccattctttctttagcaatgcgtattggtaagtgttttcatatttaggtgttccatcctcgtgggcagtaaatgaaataaattcaagaaaataaccttctttacgcattcctaatctctcacatagtttttgtgacctgcagttatcatcttcaacatatgcataaagccttcttgcttctttttgcataaagagatactcaaagaaagccttcgcactttcacttgcgtatcccgccccttcaaaacgggcattgaaattccaacaaacggaataggtatctggctcttcttttaaataaaatagttctccgactagatcattactgtcttttaaacaaactgcaatataagagtcatctcggcttcttttttgaacatttacggcagcttcttctaacgtagatattctgtcatcaagaaaacaattcactctcggatgtgccgaatattccaacagaccttgtgcatctctctcggtaaaatttcttaaaattaagcgatgggtttcaattttttgcatttgcagtctcctgtttcattgttatcgacctttgaaaagaacttcttcgtttgttgaagaacttatcacaatctatttttactataatgatgggtgttatcatctttgtcaaaaacaataatcattcatttgccgcccgcaatgtaaagtactgaacaattttcgtgaaaaaccctcagtatcgaatataaaaacgagcaatagtaataaaacaaagttaagccattaaaagcttattgagtattttttcaaacttatttacgctcatcatctcatgagtgagaaatgtccccttataaaacatgctgaaagtcgtccaaactgccggggatttttgcgccatatcttttgacgttattctcagggcctgaaaatgaagtcctttcttttcagtcagttcctttaaatgctttaacactccgactgcaaatgggcattgagctgtataaaatattgtgattccctcatcattaacggaattacttttcacctgttttttaaatacaggaggatgtgcatgttcattccacgtcagtgacatcaactgaaaatagggttctgcttcatcttgcacagcaaatcccatatgctcgaagaaatgcttatcacttaaataagggagttttttcttccccactatatgaactatcccatccataccgcgggattttgcatctgacacacatttttctaacaagtgttttgcatgtccgttattcttatatttacctgagacccaaaggcaattaataaacataaaattaggtgcgcttaccgggacccacgcttcttctgcaggtaaatattcaataaaaactttggcccgttcgtttaggcggtagaacaccaagccatcactcatccgatctttgagccagctcttcttttcatttaccgcatcctcatattgtttcgtacctaacgcacagcaaatatgattgtcatcaatattgtccctggtcaactcaatgtattccatttttcctcacccgctttcttttggaaacatcagctttacttccgatgaacattgtaatttctcagaaatatagagtcccagtaccaatatatgaacgcagcagcaatgctcattatgtaataaatgaaacttctgaaaaccgtgaaatcaattgacggattacctatgtgccagaacaagaacacagctaaaaaagcgactgcggtataaatgaaaagatgaaccaaactaaactttttaggcttctttcttagccatagttgcacaggaacagcaaacaaaaagtaagtaatgaatgcgtaaaaagcaatgataactacagtaaccaatgcaattggcacaaaacccgagtatacaaacatatatagcccgaaaatcaaaccatacgacaaacttgaaaaagccaatgtgtaggtatagctctttaatcttgttgaattcagcttcaagtcaccgccccgttcatttacttcgcacttacaatatcgtagttttattgtctatttgtctgttttaatcactatttgacattcaattttataatctgtttctcctgtttcaatctttgtatcatcgcggttaactttatatttccctccatacaaacttgctgatatcgggtgccttataccactctttaactgatcgtaaatgtatttcttgccttcttgaaaattctttcgaggaacatgtcctactttgcaatcatttacatagacagctatagcttccggatcgtacttgttgttctcttctaaccgcaattcacaatttgagaaaaggaaattatgataaataaatatcggctcatcaaaagttgattctagaatctctttatttgtcataccatcatatttttcatcgaagaaaaagctgtcttcatcctcagtcttgatggctttcttaatatctttttgatagtgtgatgttcctgcaaccttaaagtctatatactcgaaaaatgcagacttttcttcatatttccttgagaagcctgtctcttgaatcaagattgggaaattttcttttttcgataccatctctgtttcgttattaacgccaacagtgttcatattattatttttattctcattttgttcatttttaactttgttcttgaaaaagttgagtatacccaaatgtacccctccatttgaaataaaagattggtttaatcaaaaaactcatcatcaataaaatcattttctcttgcaagtttattcgaatcctttttaaaaaacctttgcttcaatttttctttaactgttaattttttgtttttgtcctggcatatatgacatatataatctccgttgtttgataaatgaataagtaatttatcgacacctgaccttttgcagatacacatcctgtgctgaccatcactaaacgaaatatgaccgcaagcatttacgcttgcatatattcctgaatgttttttatgcatgtccggttttatgtagtgcgcagccaatcttctgcattttaatgcatattcatgctcttcgccttctaaagcattaaattccttatcagttaaatctaaggagcactttcctgttctaactttataacagtcatgtttacttagcctaaaataaaaagaatgtttcgtaggatttattaactgatccaacctgatccccttctctttaaaagaatgattttatgcaactccttaaaatttgtatttcgttacttttattgtaactttagtatactatgattacttttaattatcagtatacccataaaaaaggtcaaggaaataccttgactgtgtatcgctcaccaatctgcatccggctcatcgtgttcaaatccgtgaaatccacacatctccgcagccggctccttttgtgaccaataagtaatgatttctgtttgcatcaccattcaccttatcagccgcgctcaagttcaaatgatcacccgtgaaattcttttcactaagggtaaaatcatatcctgacggcgtaattctctgcagtgcaagtcaaatatctatagaaagattatgaccgcaaattcaaagcattctgtgcatttggagatgacaaacccccatttaaacacccttcggatgacaaatcatccgtagaatcctccctgcatagctccctcaatttttgtagagacacttgtccgcaaaaatgtaagggttttcaaaagaagagtcgtgtgctaaattgtaagataagtaaaaattttctgcgaatatttgaaaggggtgtatgatttgaaagcagtagtagcaacaaaagacaaaagtatagcgatcgtacaaaaagaattacgtcctttgcggcatggtgaagccaaagttaagatggaatactgcggtgtatgtcatactgacttgcatgttaaaaatgctgatttcggggatgttaccggcgtcactttaggtcatgagggaataggcattgtgactgagattggtgaaggcgtaacaagcctgaaaaagggcgaccgcgtctctattgcctggatgtttgaaagctgcggccgctgcgaatattgcttaacaggccgtgaaaccttgtgccgtgatgtaaaaaatgccggctatacagttgacggcgcaatggctgaagaagcaatcgtagcggtcgattacgcaataaaggtgccggaaaatttggatcctgcagcagcaagcagcattacttgtgcaggtgtaacaacttataaagcggttaaagtcagtgaaattaaaccaggtcaatggatcggtgtatttggagtcggcggtttaggcaacttggctgttcaatatgcaaaaaacgtctttaacgctaaagtgattgctttcgacattagcgatgaaaaattgaattttgctaagagcttaggcgctgatgcggttgtaaacagtttaaacgaagaccccgtcgctaaggcaaaagaagtgactaacgatttagggcttgatgctgtggtcatcacggctgtctctaaaacccctttcaatcaagcgattgatgttgtaaaagcaggagcccgtgtagtcgcagtcggtttaccggtggacaaaatggatttagatattccacgtcttgtgttagatggaattcaggtagtaggttcattagtaggtaccagagaagacctgaaggaagcttttcaatttgctgcggacggtaaagttgtacctaaagtgacaaaacgcccgatcgaagatgtgaatgatatttttgaagaaatggagcaaggtaaagtgaccggccgcatggttatcgattttacttcctaatcattaaggctgccgggaatgatacggcagcctttaatctctattcttgctcagcgccccacccagactgaataagactttgtcatttagttcagaaaagaaactttacagaccattcggcggacatacattttgcaagtactgcctggactaaccctgataccaatataattccaggtcattcattgccgaagcgtagctgttatgaggaaacccaccagaggttcctcataacactaaaaacctactcactgcactttttacagcagaccttatcagagtgtttgcttaacactttgtccattctacccacaggcatcttcttctcactcggaagtgtaagataagctgttatctcatcccctgattttaatgtttttccgcagatagagcattttaactcagtattaaagaaattttttaatcccattcagaagcctccttatttacctttataaagtaatacgttaatgctttataaaagtttcaggttaaagaaatactccttgtccgggaatttactttctttcagttgttacgtacccgcacagggttaacaatcgtcttgttctttaactcacagtgagaagatcgccttgtaaaacattagcgtaaaatcatcttcatgctttgaccagtttactgcagtgcatggattgttaatttgtgacacttatttgtcctctttaaatttttcttcttctctcaacttgaaaaagaaggaattattttataaatattgtaaatttatagctgtatcacattcactattaagaggaggaatacgaatgaaaaagaaaattattgccggcgctcttgcttttgggttaattccgctaatgggggctgcagatgtttctgcaaaatctttgccaaatcaagataaagtcatgaaacctgccggttggtcatgtgacgctccgtatattgcgtgtcagcctttttctggcggtaccggtaagatttcattcaactatcaaggcagctctccaggaaaaatcagagtttttgtagcgaatgacggcagcaaatctttcaaattcaccattaattatcctaatgggaatacactcttatcctctacgacactaaatgcggggaaaacgttcattcaagaattcagcgttaaccaaaaaggagaatacatcctgaaatatgatagcggcaccggtgatagtgtcgatggtttctttagatctgttgagatctaaattccgttaggaaagtcggcagttttgccgactttcttttccaagcattctgcaggaataaacgtaaagtgtcgaataaacatatgacctttttgaaacggaaactttatctgcaccacaaacccgcaagcagcctccttgtatcgtaccttccgtccctttgtgatttgttttgatttgtcgtatactgcgcttgcccgggaaatgatgaatattttcgttaactataatttccctgtacctcttcgtatgtggctctgcatgatgaagtaacgtcatggctcaccactttcatccacagttttattgcatgttgagccatatccctcctctttaaacagcaaaccgtcccatccatttctctctttccattatttcatattcttagaagctcttcattttagacttaatatccattttttcttatttagacttaaatctatgtcgaaatttatcgtccggcatattatgtactatcctaacaacaggaggtggcaataatatggggaactacggtggaaattacggtggaagttctttcgtattgatcgttgtgctgttcattttgttaatcattgtaggtgctgcattccttttctagcacattgacgatttatattcgtctcccaaacattgcatcccttagttcggacagacgccataagaagttttatggcgtttttactttttaaaaaaatctatctaagataaacattttttattttcactctggtaagcgggagagttttctcccctgcctgcgccaatattgccgctatgaagaataaggtgaacaattcaattcggaataaagacttgttcatgaacaaaacccctaaatagttgttaaaaaactaaggcgtttttaattcatcaggattacagaggttgtgaacttaaaaaggatattactcacctttataaaattgtcatcgttagatttagtcactgaatcttttttgtaagggtccgcccacaaaatgcggtgttcacacattaaatcattttcacataaaaaaaccggattcctcttctaaaaggttccggcttttctttttgttcggtatttgtcagttaatatgcaggaaatatctggtgacgtgcacacacccgctattataatatttcaatagagccttctgttccatgaacgcggattcgctgcccatcttttatcaattgggttgcattttcaactccaacaactgcaggtaagccgtattcacgcgcgataaccgctccatgggtcatcagtccgccaacttcagtgaccaggccttttatggacacaaacaatggtgtccagctgggatcagtatagggggtaactaatatatccccatcttccaaatcggcatcttccatgtttaaaataacccgtgccctgccctctatgactcccgaggaaacgggcagcccggcaatcgctccggccgggagattttctcgtttgtactcgcctgtaacgatttcaccgtcagacgtgataacacgcggcggagatagtttttcatatactttgtactcgccttttcgtgtgctgatgatttggtaatccaatttatttgtgcgtacgacttcctgaagttcttcaaaagtgagatagtatatgtcttctttttcatgaataacccccgcttttgcgagttgttcggcttctttcagtaaagcctgcttataaacgaagtagcggctgatcatgccgtattttggatattctctgaatccgctgaagttccggatgatttggatcattcgtttagtttctctggctttttgttcaccgtccggtaattgcttcaatcggtctaataactcttgttctttcttcaacgcctcctgccgcccttgctcaaatttccgctggctggcatttggctcaaagtttttgagattattaagaatcatagggacaagtgcaattggtttttcgctccatcgagttcttgtgatatcaatttctccggcacatcgcattccgtacttgttgagataagcatagatagcgtcatgggtttcccgcccgccttcaaacttcaccagcccatccaaaaagtgatcatcttttacattctctaaataggcaattacttctggataaggacggatcacatcggcgacgtccaatagcgcaagccccatttctgaagtaatattatgaggtacagattgagaaagcgtatctgctgcgtttttttcacctaaccactcgttcattttttcgttaatccatgatgaagcatccattgcagttcgaatcagcaccgaactttttggattaaataaaatattctttaattcctggatatcttccaaaataaaacgaaataaatcagatcctgatttcgtctggatgttttgttttaactcttctatcgatgcctgactgctcttaatcaaatcagaaacaattgcaggatcgttttcagcttgatccggcatatctgcattgcctttgccgggaatcggcgccgttttatcatgtatcggtttaatgaaatcatctcgctctattatggtcataagtgcgtcttttaagagcggatcgtgctgccccataccttttaagaaaacttctctgacattaggggatgccagttgatgtgtgacatcgacaaatagccttccgccggctttacgcatgggtgcagcagtcgtcaacagaaaaaaagacaatccaaggggttttatgggatccgtcatcatttgctgatgaccgacagagatatagacgtgattttcttgatcgttcgcttcaggaacggggtataacgttgtgatcggacgactttggacaatataaaaagtatcgcggtccaaacaccattcgatatcttgcggctggccgaaatgagcttcgatctgtctcccgatacgtgccagctgtaaaatttgttcatcagtcagtgtttgaatcttttgctgatcaagatcgatctcccgtgtttccgttccgccttctcttcgttcatagacagccttttttttggtttctattctcttatcgacgatttgcccgtcctgtactttataacaatcggcagatactaagccggagaccagtgcttcaccaagtccaaaaccggcatcgatggacagcagctttcggtttccggtcatcggatcagcggtaaataaaatccccgaagcctgggggaacaccatcctttggatgataacagataaataaacttggctgtgatcaaacccattttgcatacggtaaatgaccgcgcgatccgtaaatagggacgcccaacatttactgatatgctgcaagatcgcatcgacgccggtaatatttaaataggtgtcttgttgaccggcaaaagaggcatgcggtaaatcctcagctgtcgcactagaacgtacggcataggcatgttcttcgccgaaccgggagagatggcaagcgactgctttgactacatctgaaggaatttctgcttccataatggtttgccggatttttttgctgacttcaccaatttgatcccgattctccgctttcagcatggtcagttgacccaacagcgcttgtaacgtttcgttttgttcaatggcttttcgatatccggcggttgtgacacaaaatccttccggtacttgtattccttgaatttttgataattcccctaaatgtaacccttttcctccaacgagcaaaggctgtgttttttcaatttcgtgaatgccgagaaccaaagaactcattctatatctccccttcaaaaaaatttgacaagagcttttcagcatgatataatcataatataagatggataactatgacttttaacacagaaagcgcgcgtgttctgattatatcaccgtgtctgtttttgtgcaatataaaaagaacctggccaatttggcgaggttctttcttcattttctaaggaaatcctgaagttgagtgatacctgtgaatccattgcagaaaggctatccccacggattcaagaaacaggaaaatctcaataataaaaaacatcccccacgcaatgtgaggggatgttttgtgtgtatacttctcatttcatcgtcatatgagtttagactgatgcagtcacaacttacaagaatgcttatctgtttccttcaatagtgttaacacatttgaagttatattagcgctgccgctgctttgatatccctaaactgtaatcgcttagtgtattgcgcgggagaaagaattgcattccatggtttattaatgccggctttctcatttgttaacagatttataaaaccaaggccattgataatgagtggccgtttattgttcttcctttgacctcctgaaaattaggtttgtctaaagctctttaaagctgtattgatatcttttgtgtgaacgtaaatgttcttatacaactcgaatagtgttttatatttttgaacattttgttcttttggataaaatgcagctgcttcatgaatgaactgctctgcacattcttcaagagagtcaaaccacccgcttccgaaggcagctaacatcgcagcccccatggccggaccttgttcattttctaacttaaccaccctcgtattgaaaatatcagcctgcatttgaagccacgtttcatttttagctcccccgccaatagagacaaccgtatcaactgattttcccgcttcgcggaatagctcaattgattcatataaagagaatgtgatgccttccattatcgccctcaaaaagtgctctcttttatgggctccgtccattccgatcaagcttccccgaatagatgaatcagcatgcggcgttctttcaccgactaagtaaggagtgtacagcagtccatttgctcctatcggaacagattccaccccccgcaataattgttcaaacgattcgttcggcgcaaacgttcttttaaaccagtccaagctgtaccctgcagcgagcgtgacccccatcgtataaaaagaatccttttttccatgattaaaaaagtgcactttccctttaaaatccctttctttgtcttcttcacaggaaagtatgactcctgacgtcccaatgctgcataacgtttttccggaagaaagaataccggctccgacagcaccgcaagcattatctgctcccccagcgtacacttttgttttttcgagcagccctgtcttcgccgcaacgctcggaagcagcgatcctacacagtcatgggattccacaagcggaggacaaatttctgctgaaataccaaattgattgcaaatctcatcgctccactctttgcgggtcatatgtaaaagtaacgttcccgccgcatcggagtattcggtgtgaatggcgccagtcatgcggaatctcacatagtctttcggaagcagaaaaacagcggttttgttaaaaagttcaggctcatgttccttcacccataacattttaggtaatgtaaacccttcaaggacacgattttttgtgatatcaagcagatgattgccaaatgtctcggttatcctgctgcattgaggcgtcgttctggtatcattccaaagaatcgcatgacgcagcacccgccgatcttggtcaagcagtactaatccatgcatttgtcctgaatagctaatcccgtcaatatccccggcttgaacgttggatatcgaaatcaattcagccaacgcttcaattgtttgctgcacccagtcttcaggattttgctcactatatcccgccttctcttggatgagcgggtaacttttggacgtttctgcacaaaccttgccgttttgattgactaaaatggttttaacagcactcgttccaaggtctattccaatgacatacttcattttttcactccttcctctctaaatagatttccgttgaaatgacccgccataacagtaacttcatgacgggcaattccgggaacttggctgcctgcatcttttatgcgggatctggagcttcttttttcatttggttatacctgtaaaatgtattggtttaatatcgcttttagccgttcctgtctccctgattcgtttttaattggctgattgttcagcgcatattgctcaagtgtcttaaaatcagctcttccttctgcaatttcaagaccaatcccttcagtaaagctgcggtaacggtgttgaatcacatcttcaaacacacgatcttcgattaatttgtgggcggctttcaaccctcttgcaaatgtatccatccctgcaacatgggcatatagtaaatcatcaggctcaaaagaagatctcctgacctttgcgtcaaagtttaatcccccgcttccaagaccgccattttgcaggatttcgtacattgctaatgtcgcagaatataaatctgtcggaaattcatctgtgtcccatcctaaaagcggatcaccctgattcgcgtcaacagagccgagaaggccatgcactctcgccatgcgtaattcatgttcgaatgtatgcccggctaatgtggcatgattggcttcgagatttaatttaaaatgattgtctaagccgtattgctttaaaaaggcaatggttgttgctgcgtccgtatcatattgatgggtggtcggctcttttggttttggttcaatcaaaaactgccctgtatacccgatttccttcgcataatccactgccatatgcataaatctggccatattatcaagctcaaattttaaatcggtatttaacaaagtttcgtacccttcacgtccgccccaaaatacatagttctcggcgccaagctcttttgctgtttctaatcctttttttacttgggctgcggcatacgcaaatacatctgcattacaagaagtcgccgcaccatggacgaaacggggattcgtaaacatgtttgcagtattccataataacttaacgccgctggttctcatgtagtcttttatcatgtccacgattatatccagattttgatttgtctcttttaacgtacttccttccggtgcgatatcccggtcatgaaaagcaaaaaatggcgcatccagtttttcaaacagctcaaacgctgcatctaccctcgctctcgccagatccatgcctttatagtgatcccacggtctctgcatcgtagctgcgccaaaaatgtctgtgccgtcagcggtaaatgtatgccaataggcaatagaaaatcgcagatgctctttcatcgtttttccgccaattacttcttgagaattatagtatttaaatgctaaaggattcgtggattctttcccttcgtaaatcactttgtttacgctttcaaaatagttgactgaaccggaatgagagtgagccatgtgtgatttcccccttaaaaataaattctaaacttgatgattcgaatacagatgattttatgtcatgttatatattagtttgttgcctaaacaaactaacttattttcatcttatataacctcatcagtattttcaatattttttttagttttttacgaacacattagatataataaaggttggattcgctatgtactgcgtttcgcacgataacacagaacgttcaacttaatttaaagattatacaaacggagtggatgaagtggatatcgctgatcaagcctttgtcaaaaaagttaaccaaaagttattactaaacgaaatacttaagaattctcctatttcaagagcaaaattatctgaaatgaccggattaaataaatcaactgtttcatcacaggtaaacacattaatgaaagaaaatcttgtatttgaaatcggtcagggacaatcaagcggcggcagaagacctgtcatgcttgtttttaatagaaaagcaggatactccgtaggaatagatgtcggcgtggattatgttaatggcattttaacagatcttgaagggacgatcgtccttgatcaacaccaccatttggaatgcagctctcctgaaataacgaaagatattttaattgagatgattcttcactttattgcaaatatgccgcaatctccgtacgggcttattggtataggcatatgcgttcccgggttaattgataaaaatcaaaaaattgttttcgctccgaactccaactggagagatattgacttaaaatctttcatccaaaagaagttcaatgtgcccgtttttattgaaaatgaggcaaatgccggcgcatatggagaaaaagtatttggtgctgccaaaaatcacgataacatgatttatgcaagtatcggtacagggataggaatcggcgttattataaacaatgatttatacagaggggtaagcggattctctggagaaatgggacatatgacaatagactttaatggtccgaaatgcagctgcggaaaccgaggctgctgggaattgtatgcttccgaaaaggctttattaacatctcttcagacaaaagagaaaaaagtgtccactcaagatatcatagacctcgcccatctgaatgatattggaactttacatgcattacagaattttggattctatttagggataggcctgaccaatattttaaatacatttaatccgcaagccatcattttaagaaacagcatcatcgaatcgcatcctatagttttacattcaattaaaagcgaagtatcgtccagggtttattcccacctagacaatagctatgaattattaccatctatcctaggaaaaaacgcaccggcattgggaatgtcctctattgtgattgatcattttctcgacatggttcataactgaaatgtacaaacttctatgttttacgctcatctttaaagatgggttttttgttttgttattttcatcctgaatgggagcatttctgacgtgtttttccacacgggcattttctaatatgaaaaaggagttccaaaatagaaagctcctttttcatgcggacattcatttttctttataacggaaatatctgaagtcggccggaatatgatttccgctcgtatcttggcattgcatccctacaaaagctcctgtaaagaatcccccgccgcggatgtaatcatctgataatttttttgattccaatgcaatatcgattttgtaccaatcttctttgttaaatgaatagaaataataatatttttcgttttcaatattcacttttaaatagacgtacttgacttcacgaggaatcacaattttattttttaacggttgtgaaaaagagaagttatcacatatcgttaattcaagaatacggccaagttcttcatcatgcgtgacttgaagagccgtccagttctctgtattgtaatagttcaccaaaccagcggcttgctgaaaattttccggataaaacgcaacagccgtttccgcttcaaaatggagactttgccagcgtctggctacaaatgcctgagtaaatgtcgaagttaaggattcatggccgtataatcgtaaatgatttggcgcttgagttaatgaacctaatttctccgtaaaagggattcttaacgtttgaaaattaatatttaatgtcgcatcctcaaattcatcaacttccggatacgtgtcttcaaatatggtttcaggtatagaagacgcatccacctccaagctcccttcttttccgccttctacataaggccagccatctttccaatagagcttttgaatagctgtttctctgcccaaaggacaatatcctcgctgctgaaaaattgaatcatcgtccgggtgaatgggacgtcccgttaaatgagctaaataccactcgcctgtatgtgtgtgaacaatggatgcatgcccgcatttttgcaatgggtttcctggatcatgccatgacgttaagattggattatcgggatgaacttcatatggcccctcgatatttgcagaacgggcaattgtagcagcgtgttcgaaccgcgttcctccttctgcggttaataaataataatagttcccgatatgataaaggtgcggcgcttccgtcagctttctttcagttcctttaaatatcactttcggtttaccgatcagtttttgctccttatcagaatattcctgcatgacaatgcctccaaaggagtgccgatcaatacgctgatcccataacatatttaataaatatttttttccatccgtatcatggaacaaagaagcatcaaaccccgagctgtttaatgtgatcggctccccccaatcaccatcaatcgtgtcacaagtcactaaataattgtggcaatctttccaagcgccatctacgaccttaacatccgtatagatcagccaaaactttccgtcgctgtaacttaaacatggcgcccagaccccgcctgaattaggatttcctttcatgtctaattgcgaaactctctgtaatggatgtgcaactaagtgccaattgactaaatcttttgaatggtgtatctggactcccggaaaccactcaaatgtagatacagcgatataataatcctctcccactctgcaaatactcggatcggggttgaatcctttaagtactggattgataatcttcatgcagaacgcctcctcagctattttctgttgactatcatgttttaagctttgaaatcgtcaatatgatccaaataaactttgtctctattctctaattctcgaaccatgtttttatattttttctcatctaagttatagaaattaatatcaatcatggccagaaccagtaagaacacgggaataatggttgctgtaattaaaattcccgtcaatgcctccggcgtttgcgcctgatttgccacatatccaaactgatctagaaccaaacccggtacaacccctcccaaggccatgccgaatttaaagaaaaatccgataatagcgtatatgagaccgcccattcttttcccggtcttatactctccatattcgattgtttcaggaataagcgcccacatatatcccccggcagtgagacttcctgcagcggccagcaatcgaaaggaaagtatcaggaatacattacttggcggaacaaacagtaaagctaagaggccgatcatattcagtaataatgcatagtttagtaatttcttcttccctaataattgatgaagctttggaataaacggtaaaatgaccaaagcaggcaaacttcccaacaaaccgtaccacttcactaaatccgctctttctaaattatacgttacgtaatagatgccaaccgaattactgattgaattcactccaaaaataataataaaaaaaatacttagtacaactagaggccgattaacacgaaattgctcaaatatatccgataatttaattttttcttcagatttttgaagcgtgacacgctcttttgtgcttttaaaacaaaagattaaaaggcacccgcctataactcccataatacccatggttagctgccagccaagagattcgctgccggacgtatcgcttaaataagcagccagtaagggaacaaaaaatgcaacgacaagtcccccaagattcgcaaataacatacggacagacgttatactaacaacttcttgattatttcgggtcattgcagaggttaacgcgccatatggcacgtttatcattgtgtatgtaagcgataaaccgacataggtgatataggcatatattaatttcccaatatccgaaaaatccggggttgtaaaacagagtattgccagtatgacaaatggaaaagctccgaataaaagatacggtctgaagcgtccaaacctgctatttgttctgtctactatcgttccaataaaaggatcagcgagagcgtcgatgattctaaccactaaaaacatcgtaccggctgttgctgccggtaaaccaaatatatctgtatagaagaacaaaagataagtagacactgttgcataaattaaattacatgcaaaatctccagacgcatatccaactttttcaaccatgctgatcttctttacattttcactgagcatgatttcctccccttttcgatcctttacataaggaacatgatgaatggtataacatttcttcaattttatcggccagtgaggtctttataaaagcgctttcaaaaaatgatagcagtttactttcacagagcactttcatcgtagtgaacaggataaaagcttggctttcgttttatatatacctccaattaaatcgagcctcttatcccccttccatttaagacctttacatgaaggacaattaaagcggtttattagtttgttgatcgaacaaactaacttgatttcatattataaaatcttttctgctttttcaactcttttttcagaaaatttaaaaccgatcaaaggacataccatgttgtaattgccggctccttcgacagacgttaagtaaaaaccctatgtgtcacctgactgatttattaaatgataagcacttccatcatcttttgtttagaaaaacttattaagaaacatgcacttgaaaaaatgcgaatcatatataagtgatatcccgtttaattggttgaggaggatattatgaaacctatgctgccttttgaaaaatattttggtgatttagaactggtttatgcattttatggagctatgcctaccggtgttactgtctcagaaaccggtcgtatattcatttgttttccgaaatggggagacgatgttaaatttacggcagcggaaataattggagataaattgcagccttatcctgattcacaaaccaatttggttaactttgagaatatcaaaatgactttcatcagtgtccaaagtgtagttgctgatggaagaggaacgctttggatactagatacagcggcgcccaatttttctgaaccaattaaaggcggggcaaaattagtcgctgttgatttaaaaaccaatacaatcagaagagtgtatacctttacagaagatgttgtccttccaacaacctacctgaatgatgtccgatttgattttcgtgtcggaactgcaggttatgcctatataacggattcttcttccaaaggaccaggagctattatcgtcgttgatttagaaaccggaaacgcatttagacggttaaatggagcaaatccaacttcaccggattcctcttttataccgaaagtagaaggcaaaattttgatgaatcgtaacaaggatggttcaacttccccatttaggctggcatccgacggtattgcgatctctcccgacggaaaggtattatttttttgtcccctgaccagccgccatttgttctctatctcaacagaagccctgagagatagaaatatatcggacatggatttactttatcatgtggcgtattggggagaaaaaggcgcgtctgatggaatgattacagatgcaaaaggagccgtttatgccggagattacgagaacaatagtattcgaaagatgctgccgaatggcacaatggaaaccatcgcacatgatccgagaattttatggccggatactttttcgattggtccggatggatacttatacgtcatcgtgaaccaattacatcggcaggctagttttcattatggagaagacttacgacagaaaccttatagtttacttcgtatcaaaattgatgaatttcctgctcctgctttttgaaaataaaaatggccggttcaattttagagcataattggcttcatttagcctccatcctaaaccgaataagggattacaataaatacgtgtcctcaattatggagttagattcataacttcattttttttggtcaaggaccaaaatatcgacctcttaaccttttgaccaaaacttaaaaaatcccctgacaccaatagtgccaagggattgagagattaatactgagacatgtattgttcgcgctcccacggatgaacctgtgtgcggaacatatcccattcgatttcttttgcttcaatgaagtgttcgaacaggtgctcgccgagcgctgcaaccatgacttcgtttgatttgaattcgtcgagagcttccgccagtgtcgccggaagatctacgatgccgttttccatgcgctcttctttgctcatgacgtagatgttgcggtcaatcggagccggtgcttcaagtttgtttttgattccgtcaaggcctgctgcaagcaatacgcttaacgccaggtacgggtttgccgccgggtctacgctgcggacttcaacacgcgtgctgatgccgcgggaagccgggatacggatcagcgggcttctgttttgcgcgctccatgccacgtagcaaggtgcttcatagcccggaacaaggcgtttgtaagagttcactgtcgggtttgtgacagccgtaaagcttgtcgcgtgttttacgataccggcaatgaaatgttttgctgtttcactcagctgaagatcagcgtctttatcaaagaatgcgttaacgttatctttaaagagtgataggttgcagtgcataccggaaccgtttacgccgaacagcggttttggcatgaatgtcgcatgcagaccgtgtttgcgggcgatcgttttgacaaccagtttgaaagtttggatgtcgtcacaagaacggatggcaccggcatatttaaaatcgatttcgtgctgaccaggagcaacttcatggtgagatgcttcgatttcaaagcccatttcttcaagctcaagcacgatatcgcggcggcagttttctcccaagtcagtcggagccaggtcgaagtatccgcctttatcgttcaattcaagcgtcggttcgcctttttcatctaatttaaacaggaagaattcaggctcaggtccaagattgaaatcgctgaaaccgagttctttcatttctttcagaatccgtttgaggttgttacgcgggtcaccttcgaacggcgtgccgtccggattgtaaatgtcacagatgaagcgtgctactttacctttttcagccgtccacgggaagattacaaatgtgttcagatcaggatataagtacatatcagactcttcgatacggacgaaaccttcgatggaagaaccgtcgaacatgcatttattatcaagtgctttttcaagctggctcacaggaatttccacgtttttaatcgttccgagaatgtctgtgaattgaaggcggatatactttacgttttcctcgtttactaattttacgatgtcttctcttgtgtactttgccatttcgtaaaactcctcctctaaaaggtaaatgtatatagcaaaacagttgctaacggattaatgaaagaatcgggacatgtcaccttggcggaaagtatttccccgctggaaacggcctgcctgcatcagttcgtttttcagaagctttctgagttcgtcatcagacagattgtgtttcatcggtttggcggttttttcggatttttcttccggttcggcagatgccttatccagaatttgtttgatccccgccatattgacgccttgttcaatcagatttttgatttctaacagtttatctacatcatggaatgaaaataatcgtctatttccttcgcttctcgctggaaatatcaatccattttcctcataatatcgaatttgccgggcagaaagttctgttaactgcatgacaatcccaattggaaataaaggcattgagcggcgaatgttatcactcatctcaatttcctccttttcttatcttagtctcattataggtgatgttatattttgtgtcaacacaatgtaaggaatcttaacatcaaattctttgaaaattgcaaacgccctaaatcagctctttttccattaaagcatttacggcgctgcaaatcgcatttttcacgtgcgcgtaggttaatcctccttggacatacgcgacataaggcggtctgataggtccatctgctgataattcaatgcttgctccctgtacgaaagtgcccgctgccataatgacatcgtcttcatatcccggcatatagctcggataaggcgtcacatgcgcattaatcggtgatgcatattgtatcgcctggcaaaaagcgatcatcttatcagggtcctgaaactcaactgattgaatcagatccgttctcggcgcattccatgcagggtttgacgtaaagccgagcttttcaagaaaacgggcggtaaataccgctcccttcaagctttgcgccactacatgcggagcgagaaagaaaccttgatacatttcctgcagtgaataaagcgaagcaccggcctcacttccgattcccggggaggtcatccggtaagagcaggcctcaatccacttggctttccctacaagatagccgcccgttttagcaaggccgccgcccgggtttttaatcagggagccggccataagatccgctccgacgtggcagggttcccgctcttctgcaaattctccgtagcaattgtccacaaaaacaatgacatcctctttgatttcctttacgaaacgaatcatctcttcaatttcatttattctgaaagatggacgattcgcatatccttttgaacgctggatgccgatcacttttgtattcggccggattgcagcccggactgcttcaaagtccactctgccttctgatgttaaatcgactgcattgtatccgatttgaaattccttaagcgagcctgaatactccccgcctcttactccgacgatttcctcgagtgtatcgtaaggcttgcctgtgatataaagcaattcgtccccgggtctcagcacgccgaagagcgcgattgaaatcgcatgcgtaccggaaatgatttgcggccgcacaagtccctcctctcctccgaacacatcagcatagatcttctccagtgtatcccgtccgatatcatcataaccgtatccggttgaaggcgtaaaatgcgtatcgcttactttatgttttctgtagctttgcaggactctccattcattccgttcactgatttcttctattcttttatgaacggcggagatttccgcttctgtttcttcggcggttttttgtaaaagagcgccgtgggtcagtgtgtcaaacatgttgtgtataccttccttacatgaatttcttcaattctccgagtatgctttgttcttcctgtacataacctgagacttcgtagcgttcattttcttcattaaaataaaggctgtcgatcatggtctctgatttgatgcgtgacatcaatttgccttcggcggcaggcacatgaacttcatacggtgtcatcagctcccggcgcaaataagcttcgatttccgcttttagtttcgcttcatccccggcgattcgggcgctgatcatgatgtggccttctcccgctgtcgggatgaagtcaggaagtgtctcatcacgtttgttataagcggtcagcaccggaatatcatctgcctcaagctcttttaacagtccgaggacagtctgttcatgcccggcataatcttcattggatgaatcaatgacatgaatgatcaagtctgcttccttcacttcctcaagcgttgaacggaaagcggcaatcagcgtcgtcggcagatcctgaatgaagccgaccgtatcagacaaaaggacgctgtagccgcttgggagcgccatctttctcgtcatcggatcaagtgttgcaaacagcagatcttcttcatagctgtctgagcttgttaattgattgaaccacgttgattttcctgcattggtataaccgacgagtgcagcctgaagcacgccgttctttttgcgtctctcccgataacggcttctgtggcggataaccgttgacagctgcacgttaatttcgtgtatgcggtttctaatgtggcgccggtctgtttcaagctttgtctcaccgggccctctcgtcccgattccgccgccttgtcttgagagattgattccttgtccgctcagacgcggcagcgcgtattgaagctgggccaattcgatctgaagctttccttctctcgtcttcgccctttttgcgaatatatccaaaataagctgcgtgcggtcgatgatcttcgcttcaattgcagtggcgagtgatttaagctggctcggtgacagttcatcattaaaaataaccagatccgcttcaagctcttcacacagcgccttcagctcgtctactttccccttgcctatgtatgtagcggcatccgctctgttccgtttttgcgtaatccgggtcagcaccgttccgtcagccgtttttgtcaatgaagcaagctcttccatggaatgttcaaagtgctcatctgtcatgtgcggaagctggcagccgaccaaaatgaccgtttctttttttccttcctgttcgttcaaatggatgttcctttctgtgtcgtattgggcagtagtactatcataccaaacccgcagggcgtataccacacatccggcgggttttaaagagagaaataaaaaagagacccctcaaaccggctgagaggtctattcgtgagctgccgcctcatcttttataagtaaatcctggctcttgatcgtcattaaatcgtttttcaagtattggtctcccattaaaagtctcatggcctgagcgcggatcgatttttcaatcacgtttctgacaaagcgcccgttgctgaatttaatggggcttgtcgtgcttttcactgtcattaagtaatcttttaacttccactcggcttcctggcttaattgatactcccgctctgctatcatgcgctttgcgatgtccatcagctgagtgacagagtaatccggaaaatcgatgctgatagggaagcgcgattgcagaccgggatttaatgacaggaaatgtgtcatttctctcgagtaccctgccaggatcagaataaattcatgctgtttgtcttccatatgtttgacaagcgtatcaatcgcctctttaccgaaatccttttctccgcctcttgcaagtgagtatgcttcatcaatgaataaaatgcccccaagcgattttttaatcagatctctcgttttttgcgccgtgtgtccgatgtattcaccgacgagatcggcacgttccgcttcgatcagatgtcctttggaaagaacgttcatctcgaagaaaagcttgccgatcagtctcgcgacggtggttttcccggtgccggggttccctttgaacatcatatgaagagcttgttttccgactttcagcccttgttcggcccgtttttggttgacgaatatccacgcgtaaatttctttaatgttgcgtttcatttcttccatacccactaatgtgttcatttctttttcaatttctttcagaatgctgtgcttggcttcatttttttgcagggcggcctgatattccgcctcagcttctgcatttgtcagcacttgcttttggccattaagaatgatgttaatttgtccgttatttttataggttacagcgcgctccaacatgctcacctctctgttctctctttatcttactcatgatgaagcggttctgtgacatccgcctatcatcatgaggcccgttttcctctttatctgtcactttttccgttctcttcgggaatgatgttgaatcctgcgctttcccgagaaatatttttcatttcttattgtattcagcaaaaacgggaggacaaaccatttatttttattttccgggaaatgttgggtgtatttctcatttttttcatgaatgacagccgtacaagcaccttttgaatatcatcatatgctgtaatgaggtgatggagaatggttaaaatttttatagaccccggtcatggcggaactgattcaggtgcaaccggaaacggacttcaggaaaaagcggtcacgctggagatcgcactggctttgcgcacgattctgacgaatgagtatgaaggagtttctgtcacgatgagcaggacaagcgataagacggtcagcctgacggaaagaacggatgccgccaacagctggggcgcagattattttttatccattcatattaactcaggaggcggaaccggattcgaaagctatatttaccccggtgtcggagcgccgacctcgacttaccaatcagccgtccacacgcaagtaattcaagcatcgggttttaatgaccgcggaaaaaaaacagccaacttccatgtgctgcgggagacaaggatgccggcgattttgacggagaatggttttgttgatacgtcagctgatgcaaacaaactgaaaacagccagttttattgaaagccttgcaagaggacatgccaagggcttggagcaagctttcggtctaaaaaaaaaggctgacttatataaagtgcaaatcggcgcattcaacgtgaaagcaaatgctgatgcgcttgccgccgatgcggtgtctaaaggttttgacgcgattgtgcttccaaaaggcggcttatttaaagtgcagatcggcgcattctctttcagagattatgctgaagcgttggcagcgcgggccgaaaaagccggatttgatgccttcattgtgcaagactaaatgaaaaaacccctgctctccctttttgggacgaacgggggttttttgttattgaagtatatcggcgacaaaccgagaccaagcttcaagacgatgatacacattttcctctttcagttcgctcagtttcatccagcgcccggcgatttgatctttttctttcacttcgacttgtgctgcaggcgctaactggagcgcagaaaggatgccgatatgcaccttccctacatcgttttcatcatcattgatcaggccgagtgtgacaatgttttgtttgtcctcctcgcgaatgtacaattcttccgccagctcccggtcggtgttctgtttcagcacttccaaaaatgaagccgccccttccatagggttcatgtgtccgccgaagccgagagaaagcttattatggaggcgcgattcccctccgcccgcgagccgttcatacacaaatacctcatcatcgcggcggatgacgacatacggaatcggctgtttaaatcgcgggtcctcttccgcgtcgcctcttctgatttcaaaaaaatgcgcctcaatttgagccataatttttatgatacgttcatcctcgctgttgactccctgaaatgtcagcatttcgttttgaaagacgtcactccgcggtgcagccaagatgatttcatccattttattcatgcccgttcctcctgtcttacctctccactcaagccaaaagagcagatattatatctgctcttcatcttggccaaaataaaaatcttcgtccttaatcggttctaccgtcgcctttttgtagccgttccctttcatggagaagaaatcatgtgattttgttttggtgtttaatccgtttaatacaatcggattaatatcctcttcttcaaagtaaggatcgaaccctaagttcatcaaagctttattggcgttatagcggatgaatttctttacgtcatgagacagcccgacttggtcgtagagatcctctgtatattcaagctcattgtgataaagctcttctaaaagctcaaccgcaaattcgcgaagttccgcttttttcgcttctgtttgtttattgaatatttcctgggccagcagtccgacatatacaccgtggatcgcttcatcacgaagaatcaggttgatgatctcaccgctttgcatcagttttccctgtccgtaaaaatataacggataatagaaaccgctgtaaaaaaggaagctttccagatagacagaagcaaccatcgctttgaacagtgaaatttcatcatctttttgaatggctttgtaaagcccgacaatcatttgcgcttttttctgcagatatttattctgctttacccattcaaatacttcgttgatcgtttcagtcggagcaagcgtcataaaaatatttgaatatgattttgcgtgcaccgcgttttccatcatcgccatgaaattaagaaccgcttttcgctgatggccttcgacgtgctcggccacaatcggcatgcctgtgttcccctgctctgtatcaagcagtgtcaggccggcgagcaccttcatgtacgtatcctgctcatttttacccaaatacttccaagtaagaagatcgccgtttaatgcgatctcttccggaagccaaaactgctttacgttttggttgtagaacatttgggtgaaatcatcttcatgctttgaccagtttgctgcgtcataaatttttgtcactgttaactctcctttaatcaaacgacacaagaaagacagctgtcctgcccggtatctttcgttcttgcatagtaaatggttttgatgcctctatggtgggcatacagatcaatacggttcagatcacgagttgtcatcgtatctttcaaaaacagggtaaagctgattccctgatcgatatgctgctggattgtcgcgatcatatccaccactttgaacatgtccatatcataagcttctttgtagaagaaccagttattagacgctaaccccggcatcgggtaatacgtttttgaatttccgtatgttctttcttcgatccgttccatgatcggcataacggacgccgtgctggattggacgtaggaaatggagcctgtcggcgcgatgcacagtctgtagctgtggtacatgccgttttcggcgacaaacgccttcagctctttccagtcttcgattgtcgggatgtgcatgccttcaaagagcgcagcgattttttcgtatgccggtgagaactctttttcgatgtatttattgaaatattctcccgttgcataagtggagccttcgtaatgctcaaacgtttcgcctttttctttcgcaagctcagctgaacgctggatggaataaaagttcaccatcataaagaacgtattcgcaaaatctcttgcttccgggctttcataagcgatgccgttttgggccaggtagccgtgaaggttcatggcgcctaaaccgatcgacttcatcgctttgttcgcgcgtctgactgccggcgcgttgcggatatccgtcgtctcagatacatgagtcagggaatccgtcgcgagtttcaccgtgcgctcaatcgatttatgtttcatgacattcaaaatatttaatgaaccaaggttgcaggaaatgtccaggccgatttcgtcttcctcgtcataatctgtgtaagccgaaacctgtgacgcctgaagcacttcagagcaaaggttcgagaatttcacttttgatacgtggttattcgcatgctctttgtttacgttgtcctggaacataatgtacggataacctgactcagaacggagaacggcaagcttttcaagcaatttgcgcgcattcactttttcttttttgacacgcgggttgtcaacaagctcctcatacatcgccgtcatgtccatctcatccatatgctggccgtattctttataaatcgtgtgcggatagaatacataagccgctttgtcctcacgtgcaagctcaacgaacttatccggaatgacgacaccgatagaaagcgttttgacgcgcacatcttcatccgcagaaatctttttcgtatcaagaaagtcattgatatcgcggtggaaaatgtttaagtacgccgcgccagagccttgtctttggcccatttggtcagcgtaacggaacgcgttatcaagaagcttcatgacgcctacaacaccttttgtggcgttttcaacatctttaatcgcttcacctttcgcgcggagcttggacaggttaagagaaacaccgccgcccagtttagaaagctgcatggaaatatcgatcgcccgtgaaatatcgtttaaggaatcattgacttcgagcaagaaacagctcaccagttctccgcggcgttttctgccggcattcaaaaatgtcggtgtgctcggctgatattcctgattgatcatcagattcacatattcttttgctttctcagtgtcgccatttgcgaagaacagcgcaacaattgagatccggtcctcataacgctcgaggatttttttcttgtcattcgttttcaaagcatagtcattatagaatttaaacgcactcatgaaggaaggaaaacgaaacttcttagcgtaagctgtcttaaacacttctttaatgtcttcaaaagaataaaggcttaagaattcctcttcgtagtattggttttcaatcaaataatccagcttctcttttaaatcgtgaaagaaaactgtgttttgattgatatagtctacaaaatagctatgtacagcctctttatctttatcaaactggaattttccatcttgttggatcatgatttcgttatttaactggatccattttggcacttgattttgtgacaactctttctacctcctgagtaaacaattcaacgtctttagatgtgccgctgagttcaaatttgtgcaagatcggcacctgatattgtctagagatggtatcggcgctttttgcaaagttatcgccccatactttgttgccgctcgcagcgactcctaataagagatgggcgtatttttcgagaaatgattgtgttgatgccggtacctgaccgaagtttgtcgtgtaggtgaccaaaacaaacggagtgtccacgtggtccatttcgtccaccttgcggatcagctgaaagtctgttttattcacaaaacgctgaacattccctgtctttgaatcaaatatgatttgaaccatccttatcacgacctatcaaaaataatgaatctcttaacactatatatagtatactaacctctcagaaaaacacaacatattgagatcgatttataaaaaattcatatttttgaaagagcggactttggctccggcccgattaacgcccaaaaaagagagcagaacgagaatcatctctcatcctactcaaggtgtcatgtgtaagccgatgtctatcataacatgaaaaaaaactgcttagtagtctagacttttattcttattttttgtaagaatcacattttttttcgctttcaacggtttcttcaatctctacatcagcaccgatttctttcagtacggctttcagagcgcttgtgatggaagcctccctgatcagttctttgccgtcaacgatgatgctggttccatattcatagcaggaatcatcttcacaagtttcttcccaatggttgattatcaccttgtgtttcaatcgtctcaccctctgcatgatcaatgtcagtacttagtgtagcttgtgcggcccgctttgtaaattcgaacgcttgtgaaatttattcaagctcatccagcgccgtttcttttttcagttcgattttattcgttttttcatcatagcggtatatttttagataaccgccctcgacaatgccgaaacgattatgttccagctgcaccatgccttctgtctgcgattcggcatccgccaagccgccgtcatcatccgtcaccaccgtctcgtgattgctgcaagctccaaacagcaaaaaaacagcgatccaaacgagcgtaatcctgattcttctcagttcattttcactttcgaacacgattttccgaacccccttttatctttccgatatacggcctgcaatatacagacgcgcatagaaaaagaccattgttcatggtctttgtcaaaaagtctattcaagctcaagctggacgtttttttgcggggcgaacgtggagatggcatgtttataaataagctgctgcttcccctccgtttcgagcaaaacggtaaagttgtcaaagccttttacctggccgcgaagctgaaagccgttgagtaaaaacaccgtgacgaacgtattgtcttttcggatttgattcaaaaactgatcttgaatattaatcggtttcatgtttcgtcctccttggttctcaatacaatactgtttcgattaaatttccagttttcctgctatgcactcgaaaatttccttttttttctgctcaatatcaacaggcggcgtcatatctgtccatgaaacgggcattttattgcgaaaccaggtcagctggcgtttcgcatatcgccttgaattttgttttaattgctccacggcctgaggaagcggcacttttccatcaagatattcatacagctctttatagccgatcgcctgaatcgattggctgtcccggatattcatatcatacagccgctttacttcgtcaagaaggccggtttccagcatcaggtcaacgcgctcgttaatccggccgtacagtacttctctgtccattgtaagaccgataagaaccgcattgtaaagcagctcccgtttttgggttttaagatgctctgacattgtttttcccgatacatgcaggatttcgagcgcgcggatgactcttcgcgtattgttttgatgaatggctgccgccgcttccgggtcggctgccgcaagcttggcatgaagcgcttccgccccttcttcagccgccagtttctccattcgctcccggaatacagggtcgccggagttttccgtgaacgtatagtcatacagcacggactgaatgtacagacccgtccccccgacaatcatcggcagctttcctctaccggcaatctcggtgatttttcccctcaccattttctgataatccgccgttgaaaaagtgtcggacggctccaaaatatcaatcaggtgatgcggcacgccttctgtctcttcttcggtgactttggccgttccgatgtccatccctttatatacctgcatggaatctccgctgatgatttccgcattcagcattttcgcgagtccgatgcttagttttgtttttccgactgccgtcggtccgacgagtatgacgacaggctgttttttatttttcaatatgtatcactctcttttataaatctccccctaattatagcattcatttcttcaggcacctatccattttgccctttttcctgagcgctaaacgtccgctaccacccgatcggctcgtttccgacaacctctctcgtttttcctttgagcgtatggcggtgcgttttccgtccttcctcccgcggatcgtaaacgacgccgccatgctggatccgaatcggctcattgtaggcggcaaaggtggtctctgaaagctcatggtaatgtgttccgtcaaccctcgggatggcagggccggaaatgccgtaatacctatgaaaatggccgttttcaaacgaggtgatgcccgtatagaaatgtgtatgctcatctgtattgctgccgttctccggctgcgaaaagccttcgatcatatggtagtgcccctgcactacatccgtaacagcccggtatgcgtgtgtgtgcggaggtttttttgaccaatcggactgatacaggcccacaaaagctcactcctttatttttttgataaatgcccaatcaaaaattggtgggctgaatactctgttatcatctcaaatttattcttggaggtacctaaattatgaatgaagaatacacatatgcagcagatagtgatatgagaccgtttggacggcccggatttgggtttggacggccgggcttcgggttcgggcggcccggattcggcttcggcttcgggcggccgggttttggatttggccggccttggtttggttatggattcggacggccgtttggtttttacggcggaccgttcttcggagggcttgtcggggggcttgtcggaagcgctttattcaatccgtacctgtacggaggttacggctacccttactatccgtattactactaagacaatcaaaaagggctcctttcaggggcctttttatataggcctaatgtcttgacttggcgggcaaagttcggatattattttattttactgccttaaacaaaaggcataaggattatgatgagagggggatttgatatgattctgggttatatcttcctcacaattgctattttatcagagtcaatcggcgcggccatgctgaaggtctcccgcggatttacgcggtttttgccgagcgcgcttgtagtggcaggctattcattggccttttatatgctttcacttacactgaatctcattccgctcagcttatcctatgcaacatggagcggagcgggaacggtgctcgcatccattatcggagcgaaatggtttcatgaaaaactggacaagcaggccgtcatcggacttgtattcttattggccggtgtcattctgatgaattggtagaaaggagaagcatgatatgaaaggattactctgcctggcattagccattgtatcagaagtgttcggaagcacgatgctgaagctgtcggacggttttacgcacttatggcccgctctcggcgtcattgccggaatcggagcctcttttatgtttttgagcttctctttgaaaagccttgatttatccgccgcatacgcgacatggtcaggtgtcggcacggctttaacggcaattgtcggcttttttgtttttaaggaagccatgacagctaaaatgatgatcgggcttatttttgtcatcacgggcgtcatcctgctgaaccgttccaagtctcaaaaagctaaaaaaaatcaaacggcccggagctgaccgtttgaactcgtcaagcgcgggcagcttttacttcaacctcaagctccatctccacgtttccttggaccgctcgtgaaatcatacatgaggactccgctttttgcgctaacttcctggcgagcgtaaagtccgtttcggctgcatccggctttaataatataaacgggcggtgaatgattttctggtacgtgaacacaccgttcgtgacgtctacaattccttcagattccatatgtagatcttctttatccaggccgcttctttccatcatcgccgcaagcgttataatataacaggtcgcggccgctccaagcagcatttcatcaggatttgtgccttctccgggtccgtccatttccttaggaatggacacagcggtttccagccggccgcttttaatatcgccgacgtcattgcgatttccgggccaatttgcttttaaataaaagtgatgttttgccaagggacaaacctccttttttttcagtttactcacctttcactggtttgtctttttttaagctcacgaatactcttgattgatcactctttttatcgtacggacaaaccggtaaaattcctccgtttttgtgaattccctttcgcggtaatcaaaattatcaaaaaacgcctcccgctgttctctgctgatctcaagctgtatactcagcccggtttgcgcctggttattgatattttcggtgtcaaccccggccagaccggtttttgaggttgccaattctgtaggaaatccgtttcgtttgagagctctcaccaattttttcgcccgcttccggtcgcttcctccgacaagagtatttttctcgtcgcctttataaccgtgaactgcgataacataatggtgctgcttaatgctttcgactgctgaaggctcatcgaacttggtgctcgtaatatgaagagtctggttatcatgcgcttttaatccctcaaacaggtaggttgaataatcatccctgaaagagcggacgatctcgctcaccccgccctcaattctccctccgtgcggggacatgatcaatacggggctcccctttctcttattgtacgatatatgataatcatcggggtcttcatgttcagccagatctttaaaatctgtgtatgtatcagaagaattcgagggatcagggtctgacgcataatgagcacatcttattagtaagaccattgctacgataatgatgacattaagtaaaattcttttcatcagctctccttctttgctcctttctgaaaaatgaaatattcattatatggatttttgtcaataggtcttatcttaacattctattaacattatcatcagtgaaaaacttcccggtttcgaaaaatcaatggattgtcacggttcaagcgctcaaatgccgggcatcagtgaaaaaaggttgagagagggcaaaaaaaaagggaggaacgcccgaattttcaggggcgggagattcacggccggaaacggacggcatcaagaatacgcttttagaaatgaatatccgcctcccgaagcaaatgcgcaggacagaatggagcccgtcaaaaaagttctcatctgcctttttgtacagcaaaatgccattacagcccgctcatcccctttttttatcataatggtccgttttgaaacggagccgtctctttattcatatatataatatcaatcggaagctgtttttccaaggaatgtctcaatatgatgttcatgtatatactaccttccgccggcttcattacaaaacgaacaaacgttccgtttcaactcgatttcttctcctgaaaaagccgcaagtaaccagcgctcctgaaggacaaacaaactgaccgaacttacggcctgttcatatggtatagagagaatcgccagaatgggaggaaaagtatatatgtttggttactcaatggtacaaatggtgcggtcaaatgctcataagctggactggccgctcagagaaaacgtattacagttatataaacctttcaaatggacaccttgctttttacacaattttttcgaaaaaaaggtgaaaaacagaaagaaaatgtcagtcatcattgaatttgaagagggctgccatgaatccggttttcacagcacaggacaggtcttatcaaaagaaaaacgctgcaccataaaaaagcagtttcaaacaatcaattgctgcagcgccgaagtcacgccgtccgcccttcacatgcttctttcgcaatgccgggatatccgtaaaatctatttaaaccgtgaagtaaaagctctccttgatacagcagctgaatcgtctcatgcaaaagaagtgacccgtaacggcaccgtattaacaggaaaaggcgtaaccgtcgccgttattgataccggaatctatcagcatcctgatttagaaggcaggattatcggctttgcggactttgtcaaccaaaagacagaaccgtatgatgacaacggacacggcacccattgcgccggtgatatcgcaagcagcggcgcttcatcttcgggtaaatatcaggggccggcgccggaagccgatctgatcggagtcaaggttttaaacaaatcaggatcaggaaccttggctgatatcattgaaggtgtggaatggtgcatacaatataataaagaacacacaaagaatccgatcagaatcatcagcatgtcgctgggcggagatgcgctcaaatatgataaagaaacggacgacccgctcgtcaaggccgttgaagaggcatggaatgaaggaatcgtcgtctgcgtcgccgcgggcaactccggtccggaagctcaaacgatttcaagccccggtgtcagcgagaaggtcatcacggtaggcgcctatgatgacaatgatacagccagcaatgaggacgatacggtcgcttctttctcaagccgcggcccgacggtgtacggaaaagagaagcctgacattcttgcgcccggggtcgatatcgtatctcttcgttctccgcgttcatatcttgacaaattacagaaatcaaaccgagtaggctccttgtatttcagtctgtcgggcacgtccatggccactccgatctgtgcgggcatcgctgccttaatccttcagcaaaacccgcagctttcgcctgacgaagtgaaaacattgatcagacaaagtccggatcaatggacaaatgaagatccgaacatttacggagcgggcgcagtgaacgccgaaaacgccgtgccgaaagagtaacctttttatcatgagaacggggtcgtctgcaccggcagatgactccgtttttcaggtgaatagatgaaacatttataatgaaggaactcggaacaggtcagaaccggctgtcagaaaaaaagatcaacgcaaggcagtgtatttctaaaaaaatagggaataagtatggtgtagataaaaggaggaatcacaatggcacttacaaacaccgaattgtctgaatggctgcaaaaacagatcggacaaacgcttgatatcagaaaaggagagctgacagacagccgaaacgagatttctgatatggatcagatcatgcttcaccttgatgacgttctcgtccgccggacaaaccatcccgatgactatgtagcggatgaagaactcgtcttaaaagggcacggcacaacctatacggaggaaggaaatgtcccgcttccccaagatgcgtatgaaattcctctgctcggcgacattaccatccaacaggagcaagacggattaaaggtacatacagatcgggccgtgtatacaatcgggacccggaaagagcaataaaaagaaaaaacgccgtgaaacagcggcgttttttattggtttttttcttcagaatatccgtggaacatcgtgaatgcgcaaagcataatgcctaaaataatgataatcgggagccagatcacggcaaacttataatccggttcggcaaaagcgcctatgaccgccccaaagcaatacagaaccaaggcaagcgcgcgcaatacagcatctctcgtaaactgcttccgcttgtccgctttgtaaaaccttgcggtgagatcttcaaaaaaattagcgagcgttcccgttaatacggtcgtggaaatccccgctacaccaagttttctcgcggctgtcgtctgcattcccattgcgaagctgagcagcataatcagcacataaacagaaatggcgtctgcaaaaaagcaggagaacaaagcaaacagcagcaaaacagctccttcaatagctaaagcggcagttaccgcagggggccagaatgatttctttttattgcccacaagcagggccgcggcaataacgccggcaataaatccgattaacgaggttaacgatttgagtacggcaaggtgccatgagttgccgatcgccaggccgaacagaacgatgttccccgtcatattggcggtaaagatatgtcccaggcttaaataaccgatcacatccacaattcccgctgttaaacaaagaagtaaaagtgcaatatttcggtatgtagtcactgtcaatgtgatccaatcctttctcatgctgattccaacatataagtttactctttgccatttcatatgtccagccggcgtgccgctttttcaaagcataaaaaaactccggcgaaccggagaagttactgaacgataaataatactctcgtgccgtcggaatagccgctcatttgatttccaacccatgaaccggccccgcggttatccgatggggttacatatctgatatcagcccccgccccgccttctgtgcagactgccatgggccattcatcacggtcaaacccgggctttgtcggaattcctttcaatgattctttccttctgttctccgctccgccccgatcaattgtacaaatctcagaatgacctgccgaaatggcgtcttttatatgatttcccgtctccggatattttgacagcgggaaatacagcacctgatcgtatcgggatgcagcatgagcagcactgtccgaatggatgccggcgcccgtaaggccgaactgaagagagatcaccaaaagcagacttgccgcccatttcataaacgcattcattcacatcctccttaagaagttgatatgaagcgtaaatatgtatattagccggatttaacacacatgatgaaatggcaaaaaaagtttgctgttttgttgataatcaacgaaaatggcggctttacgatttgtctattgaaccggcttctttttccttatatattttagacatacttatgagccgttgtgatcagtgtcttcggcagataaaaggaggaatgccgtccggtcggcaggcaccggctgttggttatgtcttttcaaaaacatgaaggcggggaaatccagatggaaaaaacaatgtttcacccacactcacccgagtttcacgaagacccttttgcggttttaagcagattcagagagcaggaccccatacataaattcgaactgcagcgtttcggaggcacctttccggcatggctcatcacgcgttatgatgattgtatggcgtttttaaaagacggcagaattacgagagatgtaaaacgggttatgccgaaggagctgatcgcgaagctgaatgtcagcgaagatatcgattttgtctcagagcatatgctggcaaaagaccctccggatcattcacgtcttcgatctttggtgcatcaggggttcactccccggatgattgagcagcttcgcaccgggatagagcagatcacagaagagctgctggatgaaatggaaacaaaagcagaccctgatatcatgaaagatttcgcggcaccgcttccgtttatcgtcatttccgagctgctcggaattccgaaagaggaccgcgccaaatttcaagtatggacaaacgcgatggtcgacacgtcagagagcggacaagatgcgaccaaccaggctctcaaagaatttaaacaatatatgaaaacactgatcgaagaaaaaagaaaacatcccgctgaagatctgacaagcaagcttatttacgctgaagaggacggccaaaagctgagtgaatcagagctgtattccatgctgtttttgttagtcgttgccgggcttgaaacaacggttaaccttctcggctccggcaccctggcgcttcttctgcacaaagaccagatggagaagataaagcgacagcccgaaaatatccagacggcggtcgaagagcttttgcgttacacctctcccgtcatcatgatggcgaatcgatgggcgattgaagatttcacctataaagatgtttctattaaaaaaggcgatatgatatttatcggcatcggttcagccaatcgggacccggaatatttcgatgatcctgatacattaaatatagcgagaacaccgaaccgtcatatctcttttggattcggcattcatttttgtctcggggctccgctcgcccggatggaagcatccattgcctttacttcgcttttaaaacggtttccgaatatagagctgaaaggcgcgcacgaggatgtaaagtggagaaaaaacgtgtttttgagagggcttgaaacattgcctgtcagattttaatatcgccccctgtttatcgggggttttttaatgtcttataaacaggaaatcaatataacagtgaatatttagtacatagtgtatttagttctattgtaaaaaaagcggccggattgctccggccgttctctattaccgttttaccaactcatttgtttcgtccagcttttttttgaaagatttaaggaaatttgcgcttatcgttcctttgtttgcgtacagtttttcgcagaatgccttaatggcgttttgcggctttggttccgacagcattgtgacatgattggaagagtggacgtccagcaggtgaaagtgtttcatctggtgttcccattctttccaatacgcatcatggtctaacggaatttgttcttcctctgctgtcagataacgttcaaaatctccgagaaacaaaccgcttttattacggaagtagtagcattgcagcgcttccggatgaggcagcggcttcatgtcatactcttccattccgtaagcgagctgcgtcttcatcatttgctccagctgcatccggatcgcttcttcggattttggcagaccgcgctttttggcaaggccgatcaattctttcaatacttcttcttcctcagcctggacggtaatgtcttctctgctgattaatgcctcttcaaggttttcaggcttaagatatgccgtaagcatcgtattgatcgtttgcagcatgactgacttaacagatggttttctctctttccatttttcactgtacggggtgtcgatcatgacggcgctttttactgtatgaccttcctcctgcaagaggcgcgcggtttcataagcaagcatcccgcccaaggaatatccgccgaggtcataagggcctttcggctgtaccgcttggatgattctcatataagaagcggccgtctcttcgattccttgcagcggctctttccctgtcaaacctcttgcctggatgccgtaaaaaggacgctgactctttttggcgaatggctggtatgcttcaacgcctcctgttccgccgtgaaaccaaaaaacaggacggcctttttctctttcattcagcttgacgagttcgggaaaattccggcccgcttcatgcggctggttcgtttttaacagcatgccgatctcctgaagagtgctgcatttctgaagagcttccagactgatgcggctgtctccgtcctcaagttttttcagcagctgaatagaggagattgaatcaaagccgtattcagtcagcggcttattttgatcaatttccgctgccttcatccccaaaatgtcagccacaatgtcagctgcgctctcgcggcggagctgagggtcctgggaaaccggcgcaagggtgatgtcttctggctgaccgccattccaatacttgtggtgttcaaaaggatatgtcggaagcggcactctttgaacagatttgccttggtggagtctgtcccacggtatatccgctcctttcacccagcaaaatgcaagcttttccagattgttttcagccaacagcgtctccgtgacgactgtaccgagagtcccttccagtaaaacgccgatatctcctgatccagtctgctgactgcctgtaaagaagcttttcattccattgctttcttcggaaaatgctctgtactctttcagtttttccagcaattcatcttgattgcgggcaacgagtgccaagcggcagttcatcgcctcacggccggtctgaagcgtataagcaatatcccgcagtgacggagtatctccagtttgcacaaaatcagccagctgacctgcggccgccttaagacgcccttcgctcttagcagaaagcacgataagctgcgggtcatgcgcagattctttgtctttatggctcggactgtactgttccaagacgacatgcgcattcatgccgccgaagccatagctgttaattgcggcccggcgcgggatcggtctgcccgtatggtcggtgagctgtgaccattcctgattgtcttcggtgaaacggaagcggcttttctgaataaccatttgctcatttgcagctgtaaatccgggaatgcccgggatggtatgatgcttcatggccatcgctacttttataagggcggccagtccggaagcgagttcgccgtgcccgatgcaaggtttcacggtgctgatataacaaggcgcgctttcctcttgatttgcagactcgccgtaacccgctttgattgcattaaactccagcgcatctgccatttcggaggcaatgccgtgcgcttcaatataagtgacggtttgcggatcaacatcggtgtcttcgtacgcttttttcatcgcggccttcattcccgccggattcggtgcgtgaagcgacatgcctttaccgccgtgagacactcctgttcctttaatgaccatgtgaatatgatcgccgtcttcaattgccgcctcaagcggtttgatgatgataacgcccgccccttcgcttctgacaaagccatcggcatctttttggaacgatttcgcccggccgtttttgcttaaatatcccatcgagtcaaaaccgataaaacctttcggcgattgcagaatattggcggcgcccacgacagcctgctcacattcgttatgatggattgattgaaccgccctgtgcaatgccaccagcgttgacgtgcaggcagcctcgtaatattcactcggtccttgtaaattcaaggcatatgatatcctgttcggaatgatggacggaatggctgttccattgttcggatcgctgttgcccgcggcaacgaaaacgcctgtcggtctgcttgataatgccttatttgtcaggcccgcatcctccattgccttccatgtatgcatcaaaagcagaaactgctccggccccatttgtgatgcctctttaggagaaattccgaaaaagagcgggtcaaattcgccgacaccgtcaataaaaccgccccatctgagactcgtgtcattctcatcgccggcgtaacggcgccagtcccagcggtccgccggaatttcggtaatacagtgatccccgtttacgatgtgtccccaaaaagactggatatccggggattgcggaaactgagctgacataccgataatcgcgattccttgcttgacatcggcgttttcacaaggcgtatgctgtttcttcggtaaagtgcgctcttctgtttccgtgaccccggcctcttctgaatgcctatgatcggcaagcaattgagaaaacttgctctcatatgctgacgcgaagtggcgggtcagctcctccgccgtcggatactcgaaaaacaatgttggattcacatcgatgtccgcctcttggccgatctcttttgtcagcccgatcagactcgctgaatcaagtcccaattccatgatattcgcgtcagaacgaagagatgacgcgggttcatccatcatcttggcgagcttgccaaggacgtagctgcggatatcatctgtcagactgccggcagaaatcggtgctcccgcattcttaacagccgttcgggccggctgattcatctgttcggttttcgggcggaaccgtttcagggcatagccttcaaaacgcatcaccacttccgatcggctgctgatgacatctgcgttaatcagaatcatttcccccgtttgtttagccagcttgatgtgcagccagcaatcggtaagattttccgggctgctgaaggtgacggaattaatgccgaacggcagatagctttccgtctctgtttggtccaataaagaaagcgaggccaagtaagcactgttggcgattaatggatttatggcataatgatgcgcttgttgtgagtcgctattgttcaggttcactttcgctaaaacggcatcagtgcctttgtacagacgggtgatcgttttaaattcttctccccacacgacggttcccgttccatctccgtataactcatctatccggcccacttcccggtaagagcgctgaatggccgccagatctgcgtgctgcttttgaaacggatacgggctgcactcggcatacgccgctatgctccaatcaggagacgtgcggctgcggtgcattatgctcagttcaaatccatccccgttttgtttcgattctgttttcagctcgatgtgatcgcctttttttacggtaatggggctgacgtaattcagttttttaatatgtcctccttccgcttcaggaaaaaggtcacaaaaatgatcgactgccagactgttatatgtagcgccgacgagtaccggttctccgccgaattgatgccctttcacgtatgggtcgtcatcactgtataccgcctgaacgccggcagcgttttctgattcaccgaaatgaaaagaagtcccgtggtcaaaagcgtaggccggcagatgaacggcgtgctcttgctgcaactgatcaaacgtgatattctctcctttttcccattgccgcgcacgccggccgatatcagaatcggagaaattgagattccgctgatccatgcggtaagcggccagtttttccagcagttcctgaacggaagcagccgtaaatgccgcccgatactccggatgatgcgttcttttttgcagcgcagatgcgatggcggccggatgaagagatggcgtcttttctaaaaaggccgccagtctctcaagataggcttcaaaactccattttgttttcgctgacacagggaaaatatattcctcatcgccgtgacgggcctgatcggaattcgggctgatatattcttctacgatgagatttgcatatgccccgcctgccccgaaggaattgatcatgcttctccgcggtacgatgtctcccgtctcggcatccttcagacgctcccaatactcggttttctcctgcaggtaaaaggccgtttgttcaagcgcgatattcggattttgcggttttgcgttaatggtcggaactaatgtttcccgctccatttgcagcagcactttcgcgagctgggacatcccggaggccgcctctaaatggccgagatttgacttgacggatccaagcgcgcaaaatcgttttttatcggtatattgcgagaacgcgttcgtcagggcaatgacctcaatcggatctcccaatacagagccgtttgccgctgattcaacataactgattgtttccggattgattccggctttgtcaatggaagccgccatgagcttcgcctgctgtttcggatccggagccgtgtacatctgccttccgccgctatggcacaacgcgctgcttttaatgaccccgtaaatatggtctttgtcggcaaccgctttggagagcggcttcaagagcaccgcaccgactccttctcccggcatcagccccgtgccggttccgaagcttttgctttcacttccctgttcaagcaaattcgcccgttcgagcgcatcatatttagacggttcaagcgtgagattgacccccccggcaatcgccatggaacagctgttaagcttcaggctttcacaggcgagatgaatggcgctcagtgagctggagcatgcggtcgtaacgcccatgctcgggcccgttaaattgaaaaagtgggaaatgcggttggcgatatgccaatcccctccgttagagctgagcgcagctttttccaatgacgggatattccagaaatattgattgtacatactgcccataaatacaccgattccgctgtctgattcctgccattcgtttactctctctaacgagtagccgccgttttcaaatgtttcccatacggtttcaaggcttagacggagctcaggtgtcatctccatcacatggtcttcccggatgtcaaacaagtgatggtcaaaagcgtcaatatgctgcagaaatccgccgtaccgtgttttgcgttcttcttttcgtgtttcttttgccatcgttttcagaagaccggacttccatctgttttccggagcttccgtaatacagctgtctccggcttttaaatgctcccacagctcatcgagggtttcagactcgggatagcggccgctgatgccgataatggcaatgtcgtcacgatctgagcgattatcggtgacggtttctgtttccggctttggcgcttttggctctttttgttcagtgataaatcgccgcgtttccgtgacaagcggcaccggttcattcattgcaggttccggatgctccgtttcaggaggcgcttgatcggctccgaatgcctgttgcagcttatccgggtaagtttccagcaaatactcggcaagttctttcgtattcgtgtgttcaaataagaccgttttcggcagctcgcccgtcaatgtttccagttcacggataaaattcacctgcaaaatggagtcgatgccgtatttttcaaagctggtttccggctgaatgcgctcgggagcaagctttatggacttggctaacgtttcttttatgaattgcaccgtccggtctgtgactgagaaagacggttctgtgaaatcagccggctctttggaagccgcaatttcttcaaccgccggcgcgtccggctgcttttgcctgatgacgccgtcgctttctgctgccacgatctgctggccgaggtgatgtgacgattccgccataaatgtaacgtaccgatatccctcgctttccagcgcagactgccacgcttcaggatacagcccagggcatccgggaatacgcagtttggcgtcttcatacagccaccagccttccaaaagaccgaatgtcagatgagaataaaccgaatggctgctgatctcatttaatagcaaaatcccattctttttaagcaccgctttggcattgcgaagtgtccgccgaatattttttgtcgcgtgaagcacatttgccgcaattaccgcgtcatatgcacccgcctctataccctgcaaagccgggggctcttccacattaaaccgcttataagtcaaatacggattgtcgggaccgtattctttttcagcatgcatgaaaaaggcctttgacagatcggtgtagcaatattctttcacatgatgtttgacctcttttaatcttttgaaaacggccgcgctcgtcccgcccgtccccgctccgatctctaatatccggatttccgcgttcgggtcttctttcaggcgttcttcaatgaaagccgtcaatgtgtcagcgagcacctcattaaagtagtctgccgtttcattgtttttatagattccttcaaccaattccattgaggaatcaggaaacagaacatcagtggcagaaactctgccggataaaatatccggcaaagctctgagagcggtctccactaaggtgatcatcgcccgtttgctgctgtccttgagtaaaggagctttcttttcatcccattcttgccacagaacgtccgcacgctctatcggacccgttaacacatacgtactgccagactgtttcaaaaagcctttttgcaccaagatggagatgctttcttccagccacctgccgtaaaacccctgcataacaggctgcgtttcgttttccgtaaaaaatccgacagatttcagctggcctgccaatagtttgtaaagaagatcttcagtgttttgcaaagccgtcccctccttaactcaattgttgtacatgtcttgttactttaggctgatagcttcgcagtttttgcatcgccgagccgtgatgttcagggtatacttctatcatttcttccggtttttcctccggctcttccgcctgtttcatcatgacgaactgattcaatgggccgccgagcaatcgttcaagcgccgccattgcttccggcgcttcaattgatccgactcccgcctgtttcatccgttcttgatattcggcagatgatacgattccgacactgccccagtagctccaattcatcactgccgccgaatacggccgaacttgagccaaatgagcggcaaaggcatctttgaaactgcacccggcagcataattgctttgtccggccgctcgcgcaaatgattgaacggatgagaagaacaaagcaaagtccagcggctcattttggaacacgagggccatattcacgctgacattgacttttgcagcgagcacgcttctcaaacggctttccggcatattcgccaggctctgatcctctaaaacaattgcggaatggatgattccgttaatttgcgggtgcgtgcgtttgatcgtttcatacgcccgtgtgagctcatccgggtttgccgcgtcagcttcaatataaatcggcgccggcccgaattggctgagtctgtcgattttttcctggatggcgctgttatgttttcgtctgccgatccaaacgactcgcgcctgatacgttttcacggcatattcgctccatgcttcgccgatgccccccgcgccgccaatgacgacataaacgccgcctttttggtaagcgggccggcttgacaccggctgctgtacagggatgaggcgctgtttgtaccagtgattgttgcggtacgcccatgtattgccttgctcatcaaacggcgctgagaacagctccgcctttgaaacatcttccggacatccggcatcaatcagccgtgtttgccagttcggatactcttttgcgagcgaaccgatcaaaccgtgaatgcctgcatgagccggatcaatgatgtccgccggctgtacggactgtgtttttattgtgactgcagtcaagctgattcgcttgcttccgtatcctaaagcaagcatcgctttaatcactctgtacatctggatgacgcccgcatcttgagctttcaccatgtcaccatcgctgtgaaaaggagcgatccatacgatatgcccgaaagaccctcttgctttcagttcagccgcaacagcctctatttcatcctccgggttgatatgaagccgtttcgcagaaggatgatgcaattgaaaagcctcgctttcctcatcccctgcgataaagacaacctcttccgtcttatatgccgggctttggtcacggaattccgcaagatcccataccggagccagaaggtttgctccatttaatgatgtttccggcgccggtccttccatcattctggaagaaatccctttaatcctgacacagacgcggcctgtctcatcgcataagtcaatgtccagccgctgtattttttcatccgttccccgggagctgacatacgcccacatgctggtcgtgcacgggctgaaaatgtccagttcctcaagggcgaacggcagtgacagctggttatcatctgcatgcagcttcagtccgattgtcgcttgcagagctgaatcaagcatacacgggtgaagaacgtattgatctgctgtttcttcgaggaaggaaggcagacggagctcagctaatgcttgattgcttccgatatgaatgtgctgaattccttgttgtccgggaccgtagtcaatgccgattttgttgaataagccgtaacactgttcagaagtcagcatgctgaggccgcattgagctttcagtgcgcctatatcacggtgcggagcctccccggcgccgagaatgccggcagccccctgacagtgtatctgcctgccgcttgcttctgtttgtgaatccgtgtaaatgtcatacacgatttcaccgtttcccctcgggttcaggctgatttgcgcttcaatcgggcggttttccgcttcgatcggccgaacccaaacgatgtttttcagacggatgacagacggaacttccttttgccctttgactgcctgagcaaccgccgccctggccatttccaagtaggcgacgcccggcatgaccggcttgcctttaataagatgatcggtgaaaatcgtctcttgtcccgtaaattcggatcggtaccgctgctctgttaaatccgatacattctcgtgtagcagcgggtgcagcacccgcgccgtcggcacagcttgcggtttttctgctttcggccggttgtccgtgatccagtaccgctctttcgcaaacgggtaagcaggaagactcatccgttggggcttgatatcagaatataagccgtcccatttgatatccgcgccctgcacccataattccgcaagcttgtcattctcccggcggcttatcagctcttcgatatccgcttcgccgtttgcgcctgccataatggatttcagcgggattttacccgcttttcctttataaatgcccgctttgtcataacgtcctttcgcacagctctttagcttgtcccgcagttcttcggccgaggaagcgataatggccgctctttcttccatcgcatcacgcccctgctgaagcgtgtaagcaacatcggcaagatccgcatccgtaaaagaagcttgcgccagctgctgcgcctgttcctgcagacgttcttcttctttggccgacagcacaaagatttgagggtgtgtgaaaacagctgtttttctttcttccttcgggatatattcttcaatgacgacatgggcgtttacgccgccgatgccgaaagaactgattcccgcacggcgcggcagatgattgccgttttcgtctttcaatgctgtccattctcttttttcctgtacgatgtaaaacggactgtctttcagtttgatatacgggttgatgacctcgctgtggaggctttttgcaagtgttttatgcttcatctgcatcagcactttgatcacacccgcgacaccggctgccagtgacaggtggccgatattggtttttgccgatcccaaaccgcagtgactcgcgtaaacggcgggatcgcctgttttttcgtacagcttttgaaaggcggatttcaggccgttgatttcgaccggatcgccaagctccgttccggttccgtgcgcttctatataagtgacggttctcggatcaatgcccgctttgtcataagccgttctgacgacttccgcctgggctttcggattcggtgtcgtcaaggagttcgcacgtccgccgtggttgaccgcgctgcctttaatgacgccgtaaatatgatcgcctgatttttccgcttctgacagctttttcaaaaacagaattccggcaccttcactgacggcaaatccgtccgccctgtcggagaacgttttgcatttcccttctttgctcagcgcacccgctttatcataagcgatgtggccttgcggtgtgacgacggtattcacgccgccggcgatcgccatctcgcagttcccgttttcaatggcgcatacggcgtgatgaatcgcgaccagcgagctggaacaagccgtgtcgatcggttcactcggcccgtgcagattgagcatatagctgacgcggttcggccctgctgacggactcatatttgcggctgacgcaccgccgatatccaggtcggaaaacagtgagccgtacccggtatttcccgtgccgatatacaggcctgttttcgtgccggaaaggcttttagtggaatatcccgcatcttctatcgccttccacgcatacatcattaacaagcgctgctggggatccatctgttcggcttccagcggtgaaattccgaagaacagcggatcaaattccgcaactccgtcaataaatccgccccactttacatttgttttgttggcttcgttaagcgggtcaccgtaatactcctgccagtcccagcgatccgccggcacctctgttatacaatcttttccctcttctaaattgcgccaatactcatcaatatttgcggccttcggaaacactccgctcatgccgacaatggcgatcggttccggtttatgttcagccgcagtctgaacatgctgtacggctgtttttgcaaatcgtttgttccctgccagtctgatgccgccatcatctgttacaccgcttttcttttcttctttcggctgtgtgctgccggcaaattgcgtttgatagtcttctgctaaatgatgcgccaaggcttgaatcgtcgcatattcaaaaaatacggtcggtgtcagatcaagctgataagtgtcattcagcttgttggcgaattccgtcagcgtaatggaatcaaatccgtattgattgaactccaattcgatatcgatttcttcaatgtttattttcagaagcccggaaacttcttttgccagcaattcctgaagtttggccgtcaggtctttcggcgcaggtgtttcttccgttttcttaatcggtgcaaaagcggatgcgggagtcttttgaagcagtttttcccgcattacggcgcggtttccttctataacgagcacgcttgttttccccgtgctccatgctttgtaaagagcttctattccggtttcagtgcgcatcggcgttacaccggttcttttttcggtgagcttcgccatttcttcattgacttgcattccgccgtctttccaaagcggccaattgattgacaatgtgtgaccgtggcggtacattgccgtaaccagcgcgttgcggtatgccgcatagctgtccataaatgcgtttgccgccgcataatccgcctgtcccgcattcccggtgacaccggaaatggatgagaaaacgatgaaaaagtccagcgctaaatgctcggttgcttcatcaaggttgacaaatccgtccgttttaggagccaatacactgtaaaactcttcggttgttttctttacgatatattgatctttcatcacacccgcgctatgaatgatgccgtgaaggccgccatattccgtttcaattgttttgaccaggtctgccgcagttagagcgtttgttacgtcagcctgtttgtattccgcttttgctccgagtgattcaagcgatttcagctgcatccgctgattctcgcttaatgcggaacggcctgtcaaaaccagcgtcggctctttgactttccgggcgatttctttcgcgaaaataaagccgaggcccccggctcctccggtaatgagataaatccctccgtcgttccacggaatgcgtattttgccgccggacacggccgtttctttgacatctgcgctgtatcggatgccgtttttatatttgatatggctgtcatcagcccttgttttattttctctgatgatgtctgtgattctgccgttttccgctggttctatttcaatcagctgggttttcagttttttatgttccaggccggctgtttttagcagagctgaaatccctgagagcagctgatgcttatctgttttagagagaaccgtctggataaggacgtctccttccgtctcttccttcagcagtttttgcagcgtctccaatatccgtcctgtataatcacggaagcgcgccgccgctttcccgtgcagggaggtcatttcaatacattcagctcccgcggcttcaaccgcttgttttagtccggcgtctgtgtcacaaagcattacgatatgccgggcaaaaaccggttccgtttgagcagcagtttcatcgcttcgtgtccataccggctcaagcatgagcgtttccggagctttttcttttttctcaggttctttttcagccgttctgaatgacaaacctttcagccttacgcaaaccttgccattttcatcacaaatatcaagatcgcgtttttcaacatgtccggctttgtggtcttcagaaagtctggcgtaaacccacatctcggcagcgcatgcgctgaatacttcaagctcctgaaccgcaaacggaagcatcagttgttcatcatttgttccggttaatatgcttgatgcctgcaatgcagagtccattaagcccggatgcatgacatactcctgtaccgtgtccgcacaagccgcatcaagagacagtctgcccaatacgaaatcatcacctgtataaatcgctttgacaccccggaaagccgggccgtaatcaaaaccgattttgcggtacatatcgtacacttcatctgcagaaaacggtgtctcggcggattgtgatctcagtttttggagatcaatgaccggagcctttgcgtcagggcggactgatactgccccttggctgtaaacggacggctgatctgtttcccggccgcagtaaatgtcgaattgaacgtcatttgccgtttcgggaatgagacggatgttgacatgaaccggctcgtcttcaatggtaatcggccgcacccaaaccgtattcttaagctggacgcttccttgtccggccggaacttcagatgcctgttccattgctgcgcgcgccatttcaagatgtgccacacccggtaaaatcggcacgccttttacaacatgatccgcaaggtaaaattcttctcctgtatagattgagctgaaccgctgttctgcaaggtttgaagtatttctgtgcagaagcggatgaagcgcgtcttgttttccggcagatacagtgcttgttttttcgtgttttccggtgtgtttcgccgcccaatagcggtcttttgcaaaaggatacgacggcaggctcatgcgtttaggcggccggtctccatacagcttcgcccaatcgacgttcagccctttgacccataattcaagcagcttcgcgtatttgccgcgtgccatccatttttcaacggcttcttgaatttcttcatcttccgtcagcatttgcagcgtgcctttgtctattcttcctctgtacaaatccgcatgcttatctccagtgataaactgtgacagtttttcctgcagttcttctgcggatccggcaataaccgccaggcgttcttccatggcgtcccttccgatttggagagtatatgccatagaaacgaggctggaatgatcgtaccgtttttcagtaagcgcacgtttcagctgttttgcctgctctttcaggcgtttttcatttttggcggacagaacgaaaagacatgggtcgatatgagaatcatctgcttcctctctgtcttctggaatgtattcttcgatgacgacgtgggcatttacgcctccgatgccgaatgagctgatgcccgcgcggcgcggctgttcgtttccgcgttcgtccgtctgcgtcttccattccatcgtctcccgcaccagataaaacgggctgtcttcaagctgaatatacggatttaccgtctcacagtggagacttttgactaatgtgcgatgcttcatctgcagcaaaattttaataatgcccgctgctcccgcggcaagggataaatggccgatattcgttttgaccgaccctaagccgcaatagccggccgctttctcttttccgtctgcaaacgagctgaacgcttgtttcaggccgttaatttcaacgggatcccccaattctgttccggtgccgtgcgcttcgatataagagactgttttcggatcaatgcccgcttttttatatgcggctttaataacttccgcctgttgtttcgggttaggcgttgttaaagatgccgcacggccgccgtgattcaccgcgcttcctttaatgacgccgtaaatatggtccccatccgcctcagcggctttcagctttttgaggaaaaagagcccggctccttcaccatgggcaaaaccgtcagcctgatcggagaacgtcttgcatcttccttctttactcagcgcgcccgctttgtcaaagctgatatacacatccggaagaacaatcgtattgattcctcccgccaaagccatgtcgcacgtcccttcttcaattgaagaaacggcatggtgtatggcaacgagtgagcttgagcaggcggtatcaatcggctcgctcggcccgtgcagattgagcgtatagctgacacggttcggtccgacagacggacttgtattcgccgcggatgacccttcaatcgccgcatcggcattggctaaaagagaaccgtagccggtgtttccggtcccgataaacacacctgtctttgtgcctgagagactctttgacgcatatccggcatcttcaatcgctttccacgcatacgtcagcaagaggcgctgctgagggtccatttgctccgcttcccgcggtgaaatcccgaaaaacaacggatcaaattcagcaattccgtcaataaacccgccttggttgacgtttgttttattggcttcttttgcgggatccccgtaatagtcccgccagtcccagcggtctttcggaatctcggtcatgcagtctttgccttctttcaggttctgccagaaagcttcaatgtcttctgccatcgggaaaatcccgctgatgcctacgattgcgatcggttccggcccttggtcccgctgcactgtctgcggaagtgtctcaggcagagtgcggcgtcgcttaacggccgggcgcgtaatttgagtctcttttaccggtcttgccgattgaatcgtttttgtatttaccgcaaaccgtccggcaaattcctcttcgtattcactgattaaatgaacggcaaattcatggattgtcggatgatcaaagaaaatcgtcggcgttaacgtaagccggtacgttttgtttaactggttcgtaaactcagtcatcgagatagaatccagcccgtattttgtcatttcttcatgaggatcaattttgtcaatgtttacttttaacagcgaggccgtctgctgttttaacagatgcttcactttttcaagcaggctgtcagcatcaatgtcatgacgtacgccgatctctgcttccggatgatcattctctttgcggaaccgttttgctttcatgtgtttcacatctccttcaaaaaccgtcatccgggctgtcccgctcatcaagccttgatataaagccttgatgccggcatctgtgctgagcggtgcgattcccgcctgctgcatcagcatatcttccgtctgctttcctgcctgcattccgccttctttccataacggccagctgacagaaagcgtctttccgtatctttgtcctgcggcttgtaaagaacggcggtactcggcatacatctccataaaaacatttgcagacgcataatcagcctggccgacgcttccaagcacacctgataaggatgagaagacaataaagacatctaatttctcatgttgtgacgcttcatcaagatacacaaggcccttcactttcggagcgagaacgtgttggaattcctctgccgtcttcttcaccatgtagttgtcttttataatgccggcactgtgaacaatcccgtccagcttgccgtgccgtttacggatattgcggatcaatcggtatacttctgcttcgtccgtgacatcggtctgctcgtagaaaacagaagcgccggcagcacgtactgtttccagcatgtctttctgcttttctccgagagcggaccggccggttagtatgatgacggcgtcttttgtacggtttgcgatctcttttgcaaaaatcagacctaaacctccggcacctcctgtaatgagataaacgccttcgtctttccacggaatgtccggctccgcttgagaaatatccatctcttcccaatcagcggcaatgcgcttgccgttttcatatttcacatggacgctttcggcatgcatacggttttccgccgctttttccgcgatgccttcagcactttctttctcctcgacttcgatcatttgacagatcagcttggaatgttcaagacatgcggttttgaagaggccggtaatgcctgagaacacctgctgtaagcctgctgaccgcgtaacagcctgaaaaagaacgcggcccttcggcttgcttttcattatggttttgatatggccaaacagctgacccgcataagaatgataccgctctgcaatagatgcgggacgatcgtccaggataatgacgcgtgcatgttcaagctttgcttcgacagcttgtttaacggcttcatcgtactcacaaaggaaaatgatatgctcttcatacgaaggcgcatgatcggccggtgccgtctgctctttccagaccggttcagcgaacaatgtgtccgtacggctgaccgaaacgccggcacccgcgttttcttccatgatccgcgttgagaaacctctcatccgcacacaaagccagccgttattgtcatataaatcaatatctgctttttggataggatcgccggctttattgttcgcactgaatgtgacgtgcacccacatatcatcagcgcacggattcagaacgtccagctcctctaaagcaaacggcaatgcggctttgaatggttccccgctttctgccagcagcgctctcgtcacgttttgcaaatattcggcggcctgaagcgcaccgtccatcatactcggatgaaggatataatcagctttcgtatgggagagggattcaggaagcttcaatttagcaagcagccggtcttcgcctttgtatacaagctggacacctttatagccaggcccgtaatcagctccgatcattcctttgtaaaacgcttgagattcgattgttccctgcgtgcaccggcgcttcagctgctcaatatccgccgcttcctccggttccttccggatgatttcagcgatgccctgattataaagaggagcttcttcaccgatagaatcgttaccgccgtacattctgtattgaatctgtccgtccccttcttcataaagtccgatatggacacggacagcgtcctgatcgactatcaccgggcggacccatacgatattctttaagcgcaggccgagagaatcctctgttgccccgccgatgcttttctccgccgcggcccgtgccatctcaagggtgacggcagccggcacgatcgccattcctttaatgatatgctcggcaataaaatactcttttcccgtaaattccgaactgaaccgctgctcctgcaagacggatgtattctgatgtaccagcggatgcaaaaacttcgcatctgtttgcttcacagtttcttccggccagaagcgctcctctgcgaacgggtaggtcggcgcactgattcttcgcggcgcggaatcctgatacaataagccccaatcaacacgcgctccttcaatccagagcgccgcaagtgctttcagcttttcatcacgtgtctgacatgccgcaagctcttccatctcctgagccgacacttctctgcttctcactttttcgccccgtaagatgttttggtcattgccgttgatgaaatcctgcagctgacgcttcagatcgtgacgatcatgactgataaaaacggctctctcttccatcgcttcacgtccggtctgatacgtaaatgccagatcatgcaaggaaacatcgttttcggcttcatccagaaagccggataaacaagttgcataggcagtaagacgttgcttatttctcgctgacagcggaacgatataaggcggctgtccgtcatttgatccgctgatcgttttgttttcatactgttcaaaaatggcgtgtgcgtttgttcctccgagtccgaatgagcttaacgctgcccggtgcggcgtctctctctccggaagcgattttctcttatccgccacataaaacggcgaaccgctgaatttgatattcggattcggtgacgtgtaattaatggtaggcgccagctcccgatgatataaactcatggcgactttgatgcacccggccagacccgctgctgtatccaaatgcccgatattcgtttttacggagccgattccgcaatactgctcccggtccgtgtaacgtttatacacttgctgcagcgcggacatttcaatcggatcacccaatgtcgttcctgtgccgtgcgcttcgatataggaaatcgtctccgggtgaatattcgtgctgtctaaaacatgctggatgacgtcagtctgaccttttacactcggtgcgtaaaaaccgactttatccgctccgtcattgttcagaccgatgcctctgagcatggcgtatatgtgatctccgtcctgaacggcttgcgacgcctttttcagcagaatgacggcagctccttctccgcccgccataccgtcggctgaagcgtcaaatgccttgacatgcccgtcgcttgaaaaattcaatccgttttggtgcacatagccgatgcttgtcgctgcatgcagcgttgctccgccgacgagcgcgtattccgattctccgctcgtgatgcttttataggctgaataaagaccgactaatgatgatgagcaattggaatgaacgaaatagcttggcccttttaatccgagcttatgggaaaccatcgtcggaatcgtgccgctctgcgctaacacccatgagacatagccgtcaggagattcatggccttctgtcgttttttccggtaaaagcgaccgatacgaattattgcttgccgacatatatacgcttgtcttcggaatctctttggatacatatcccgcgtcctcgacggctttccaagaatgtagcagcagaagccgaagctgaggatccataaattctgcgtctttcggagaaatgtgaaagaactcagggtcaaagagatcttttccttctatcgtcgataatgccggcacatagtcgggattttcgatcaaatcttcaggtacgccggcttcccgaagttcttcttccgagtagaaccggacgctttcctttccttctcttaactgcttccaaaactcatgatgatttttcgcgccggggaactggcaggaaatccccactatcgccacactgtcgtcaaagtaagacggcaccccgttttgcggtgtttgttctctttctctctcatcttggcctgatgcctctgattcagccgcctgtttagtttcaacaataaatcggctgatcgcctgaatggtagagtgttcgaataaatccgtgacggtaaaatcgcattccagctcctgtttaatgcgttctgccgccgcaacagccaaaagcgagtcgcctcccacatcgaaaaagccgtcttcggttttgatgcccgccgtattcagcaggtcttcccatattgcggtcactttcgcttccgcttctgataacggcagtctgcccgtcttttcagaccggtgaacaattaccttgcgctgttttaggtctttgcggttcacttttccgctcggtgttaacggcagcgcatccagacggataaaatgggcaggcgccatataatccggcagactcgataaaagatggttgcggagcgctttttcatctgccgtatgaccggagcgggccgtataataagcaatcagctttttatgtccgttcttttcctgaacaacaaccgcctgatcaagaatgtccggatgttcgttcaatttcgtttcaatcgctcccaattcgatgcggaagccgcgaattttcacctgactgtcaatccggccagcatattctatatttccgtcaggcagccatctggccaaatcacctgtcttgtaaagcttttctccttcactaaacggattatcaataaatgatgccgccgtcagctcaggctgattgtaatagcctctggccagaccggcgccggccacgcaaagctcgccggccacaccgtcagggacggggctgagcttttcatcgacaatataaagccgtgtattttgaatcggtttcccgatcggcgtattcctgcttgtgatttccttttggccgcagctgtagtaagcggcataaatagatgtttccgtcgggccgtatatgttttcaattctggcatgtttgaagatggaaacggccttttttactaaatctttcggaaatgcctcaccggccaccatcacatatttcacagggccgtcttctgtaaatgccgtatgccgctttaccgtttccagaaatacattaaacacggcgggagcaaaattcagatgcgtgacctggtgggtttggatgtattccatacaaagctgcgggtttttttctgcaccaggcggcaaaatgacaagccgtccgtttccgataaaccagccgaataattcagaaatcgaaacgtcaaatacgtaattcgtttttaacaaataggcatcctcttgcgcgaccggatactcagcttccaaaaactgcagcgtattcatgatggccctgtgctcaaccatgacgcctttcggttttcccgtgcttccggacgtatatagaatataagcgagatgatgcggttttgaacgcggcgtcagttttgccccgctgacagaacgtccgctcttttcaatttccaccgtgctcacaccgccgacggccaactgttcaatcatgccgcgcgtatttgcttgcgttaatacgattgaaacgccgctgtcagtcaacacgtgcgccatccgttcgtttggaaaagccgggtccagcggcacatacgcgcctcccgcttttaaaatggcgaggatgccgatgaccatctcaaaagaacgctccgtacaaatgccgaccgggcattccggtgtgacgcccttttcttgcaggtacacggcgagcgccgtgcttcgttcatctaattcgcgatatgtaagactgttttcaccgtatgtgacggcttctctgtcagggtggcgtccggctttttccgcaaacacttcatgaatgcagcgctcattcggctgatgagatcggcttgcttcacgtttttgattgagcaggccggaacaggcttcaaaagcgatctccggatcagaaagcaccttttctgccagtttcatataatgctccgccatccgttcgatgaaagaagggctgtagacatccgggttgtacagaaattgcaggacggttcccgtttcttttttatagacttcaagcgcaagctcaaattcgccttcctgatgaatgtcttctatcatttcaatgccgagtgattgatatagttccgccagcttttccgctccttctgtccggaagaagttttgatagaaaaacgcggtttgaaaaacaggcgaaaccgcaggcgagcgttccgtcttcaattctttgacaagcgcgggaaacggatacgcggcatggtccagcccttctgccagtgtcagctgcagctccttcaaaaacgccgtaaaggatttggcgcccgtctccctgcttctgaccgcgatcatattaataaagtatccgatgacagattcaaattgagcctcagagcgccccatcgtcggcatgccgacgatgacatcttcctgattcgtatattgatagagcagccctttgaaaatagcgagatacacaacggattcattgacattatgtttttgggcgcacactttaatctgccggttcagttcatcaggaagcaagcgctgatacgcctgccctttgcaagtttgaaccgatgatctcggataatccgacggaagctcaagcaccggcagcggtccttccagctgctttttccaataagagagatgcgtttttcccgcttcgctttccagcagctctttttcccatttcacaaagtcatgataatctgcggcctgctgaaccatgacaggttctttgccttcacttgcttttacataagcgtccagcagcgccgacataaacgtcataagagagacgccgtcaaaaataatatggtgaatggtgattaacacaatcggctcccgcttcgcccgccggaatacatgaacacgcaggagcggcccggtttcaagcgcgaacggttcttttgctttttctttaataaacgaaagagcgtcacgcccgcttaattcagaaagatccatttcttcaatcggaaaatgccgatccgtatcttctatctgatacggaaggccgttttcctcttttatcacactggtcaaaatagggtgctggcgctgcacggacaaaagggcgtttttgaatgtctcgatatccagcttttgaaaacgaaagcataacggaatgttatatgcgctcatctccggaaacattttctgaagcatccacaaacctttctggccttcagaaagcggacgttttgcagttgtccgcttgaaagcctgaagcttttgttctacttcagcgatggtgagcgttcctgatctgtaggcatcgagaagttctttatgattcataagtcttactcccttctatgatgtcttgcactcttttaaaatctaatgtcccctcagagacctgtttcatcatggcgatgatctcctgatccgtgtactccttgttacccggagcggcggcttttgtttcagtttcttccgttcggtaaaacgttttgatcgtttctttgtgttctgtcaggtaatagctgatgacgtctccgagcgtggcatagctgtaaaataaagccggagtgacttcaatgccgtaatgactcgacaaaagagcggcaaatttggctaaatagatggaatcaaatccgaattccgcccagtttttatgcaggacgagtttatctttagatattttcagcagactgtgtatcagctctttcaaatccgcttcgagccgtttttccgtgctttcttccgggatgcggcggctcacggtttccaaaagcgcatccggttttgatgaatcgtcccgccgtatgcctaaaaatcgttcggcgcggcttcttttgccggcaatgacaaggcactgggtgttgtcttgagaaatgatgcgctcaaacagctcaatgccttcatctgtttctaacaggcgctgtccgcttgattgcaggtacatgcccgtcgtctcttcaccgccgacggccattccgccgtttttccagaccggccagtttatgacaaaagcgtttccgctttcggattgttcgtttttatagcgggcatacgccatttggaacctgttcgcgaccgcgtaatcacagcatccaaaatctcctaaaacagcagatgtggatgaaaagtagcagatgaaatcaggcgtttcgtttttcagccactcgtcaagaagcaggctcccgtttattttcggttcaagcgtactgcggaaattcctgatttcattttcaaagacggatgttctgctttcgatgcccgccgcatgaatgacgccgtgaatagctccgaatcgttctttcgcgcgcttgatgcagtcgcccattccgatcggatcacaaacatcggcttcggcgtaaagaacacccgcgccgagattttccaggtctttcattttttctttcttttcttcattgatcggcgaccgccccgtgagaatgacatttgcctggtagttccgggcgagatggcgggcaaataagtagccgagccctcctaatccgcctgtaatgagatatgttccgccggttctgatcctgccgttttctttcgttagtccggttggttcggtgtgatagacatatcgttttccctcttccaagaaaacggtatggtctgtttcagctttcagctcgtcccaaatggttctcatccagtccgttatggccgcgccggcttttcggaagtggccggtaacacttgttttcggaagaacaatgccgagcgaacgctcaaagccgatccatgattccaagtagcacctttccagaccggatgcatattcccccgccaataacagcctttccggctgcagaccggtctcagccattgctttgagaatatggacaatacatgaataatcttcgatgcagcttttatcttcaagcgcccataaatacaaaatggcagaagcttcaccgtactctttttgaatatccgcaaaagcgttcacatatgattgcggatcttcccgcaccacttggcagcggccggcggacaaggcctcataccggtctccctgagcgataaaaataacgtcaatgtcactgtcatacgatttgatcacagagacggcttcctgctgcttcttctgatcagttaagaaagaaatcaccgttttgacttgcttttctccggcagccggcagagcctgttctttaagaacttctctaaaagccattacttcaaactgctccgccggatcactttcatcagccggcgccttaacgggcgcggccttgctttgtacaggctgctgatgccagaagcgttctttcgcaaacggataagcaggcaggctgatgcgggccggaggacggtctccgtataatttcgcccaattgatgtccaatccttttacccaaagctcaagcagcttagaatatttccgtttgctgatccaagcgtctatgatggtttccatgtcatcatcggccgcaaatacggcaagcatccgtttgttttcttccgtgccgtcacggtgcagtccggcgctgttttgtccggcgataaatccgttcagtttttcctcaagttcatgaagtgaatggacgataaaaccgagacgctcttccatcggcacccggccagtctggagagtaaaggctatgctcataagatcgcggccgctgtatcttttttcacggatggcgtctctgagctgttttgctttttcagtgagccgttcgctgtttttcgcggacaggacgatgatggcgggctgatctgccggcgtctcatcaggctctttgtctgccgtatattcttctatgatgaggtgggcgtttgctcctcccgcgccgaagctgcttaaccccgcccttctcggaagctctttgccgccgatgacgggacgtttccactcaccgagctcctgctgaacggcaaacggcgtatacgcgaaatcaatatttgggttcagctgttccgcgtgcagggacggcgcaatttggcggtctttgagctggaataatatttttgtcagacccgcaatgcccgctgcgctttcgcaatggccgatatttgattttgctgagccgatggcgcaaaactgtttgtctgttgtatcctcatcaaatgctttcgttaatccggcgatttcaatcggatcccctaatgcggtccccgtgccgtgggcttcaatataactgacggtgcgcgccgggacgtttgccctttcgaaagcttcttttattaaggcggcctgcgcattcggattcggaacggtgtatccgttcgttttgcctccgctgttaatggcgcttcctttaatcacaccgtaaatgtgatcgttgtcggcaatcgcttgctccaacggctttaatacgaccgcgcccaccccttctccgtctacaaaaccgtccgcgcggtctccgaacgatttgcacgtgtcgcttgcggaaagcatgttcatgactgacagattcatataatgaatcgggtcggtcactatgtttacgcccccggcaatcgcgcattcgcttgaaccgctgtatatgctctcaagcgccagatgaatggctgtcaaagaagaggagcaggctgtatcaacggcaatgctcggcccttggaaatcaaaaaggtaagataccctgttggcaatggaccagtagccgtagcctgtcgggtagtttttgttcatcgcgccggcaaaaacaccaatttttctgctttggcacaggttgtcaggcgtatagccggcatcctcgatactcgcatacgccgtttctagaaataatcgctcctgcgggtccattcgctccgcttccaaaggagaaatctgaaagaacagcggatcaaacttgtccatatcctcaatgaagccgccccatttcgtataaatagagccttctttacctttctcttcatcgtagtaatcctgccagttccagcgttcctgcggaatttcttctatgcagttttttccttttttaatattggcccaaagctcagccgctgtttttgcctgcgggtagcgtcctgaaacaccgatgatggccacgtcgcgaaccgaactttgccggacggtctctctggctgcccgcttttccctccgccgccagtcagtgcgaagcggcttggccggctgtacagcctgcggttctggtgatgccttccgttcttcctgaacaggcgtttgtcccgtcagtttgatcatcgcgtcttttttcgttttgattaagtgagcgacgagcgcttcgatcgtctgatattcaaaaaataaagtgctgctgacttggtccaatacatttcgtaacgcgtttgtcagctgtacgacgacgatagaatcaattccgtatttttcaagcggcgctttcggatcaatttgagccggcggaatttttaacgtttctccgattaacgttttcaagtactcggtgcttttttctgttaaagacgtgtcgcctttttgcaccgttgtttgcggcgctttaaattccggcgcttgtgctgcttttggcggagcggtccgttttccggcccctgctttaagcgttttttggcggacaacgccgttgctttttgccgctataatctgatggcttaattcatgtgccgcttctgccgggaagaagacagaatgccagccttcactttctaacacgcgcttccagctttccggatacaagcccgggcaccccggaatacgaagggcagaatcttcatgcagccaccagccttcaagcagtccgaaagtaatatgcgggaacaggctgtttcccgccatttcatttaagagcagcaaaccgttgtcttttaagacggctttagcgtttctcagcgtctggcggatgtctttcgtcgcgtggagcacattggcggcaacgacgatgtcgtatgcgcccggctctatgtcctggccggcaagcggcgcttctgcgttaaaaagcttatacgtcagataaggattccgtttgccgtattccgtctccgcatgcacgagaaaagctttcgatacatcggtgtaacagtattcttttatatggttttgatacggcctaagcttttcaaatatgcctgcgcttgtgccgcctgtgcccgctccgatttccagtatgcggatctcggcttttgaatgtttgctgatgttttctttcacataagccgttaatgtttctgacagggcgctgttaaagtaatccgcgacttgattgtgcttataaattccttcaacaagttccattgaagagtgcgggaacatgatgtcagtcgccggcacgtcttcgcgcagaatgtccggcagtgctttaagcatcgtctcggctaaaacagtcatcgcttttgtatcggcgttattgagccattcctctttttcctgctcccatttttgccatagcgaggcggttgtgtcttcggcacgggccgacagtttatatgaatccgcattcccttccagataaccatgttccagaaggaaagcgatcgtttgattgagccattttttaaaatattcgtgttcgggctcatacgctttaaggctttgcggcgtcagcaagtctgcttctttaagctgggcgatcaaaagccgatacagaaaatcatcgagcttttgatgttcagcctcttttacaagacgtgcgccgggcggagcggccttcagctgttgtgaagagacaagcggctgagacggataaacggaaattttttctgtttcactcatcccttcgactgcgaccggttttgtcgtatgaatgaaagctgcttgatcaaccggcagcgtcataagggtttcaagcgcctccatcgcagcgtccggttcgatcaatcccaatccgatctgatccatcagctgaataaaatcgccgtcttcagccgcttcgctgttgccccaatagccccaattcatgactttgaccggacaattccacgtctgatcaagttctttcgcaaatgcgtcactgaaagcgcatcctgcggcatagtggctttgtttcacgttatggataaatgccacaagcgaggagaagaagagcgcaaagtcaagcggctcccgtccaaatacctccgccatggacacactgacatcggcttttgcccgcagcaccgatttgaactcttctgtcttcatattatttaagctttgctcagacagatccattgccgagtggatgattccgttcatttttgtgtgacgctcttttatgaactgataagcccgctctaaggaagcactgtcagcggcatcggcggaaacatattcaggcgccgggccgaatgcgctgagccggtcgagtttcgcctgtatggaatcattcagtgtgcttcttccgatccaaatgatatgtgctttgtagcggcggatcatgtattcactccatgcctcgccaagatatccggcgcctccgatcacggcataaaccccgcctgtttggtacagcgtgccgtttttcggcatattgtcaagcggtatcagctgccgctcaaacagctgctgattgcggtacgcccaaatttgaccgttttttccggcagaaagactgagcgcctctttgaccggccagctgccgtccgtttccgtgtcaatcatgcggatattccaatgcggatattctttcgccattgttccggcaagtccgctgactgcggcctgtgacggggcggcgctgtcttgatcggaaaacggctgggcatttgctgtgacgatgcaccagtccaaatgtttttctccgtaccccaaggcaagtaatgctttcatcagcttgaacacatgaagaacgtttctttcctgttccttgaggctgcaagcactctcagcctgcggagcaagccaaatgatttgctccagctctttttgtccttcaagcatgtacgtaagagatgtgatatcatccgtacctctgatcggataataggaagcgttcggcagatgttcttttatgcgcgtatgcgttctgtcagtttcaccgaaaaccgcagtctgcttttccgctgtttttgctttcttcgttttttcaagtgcaacgggctcccatgccggaatcagcatcgtatggccgacaggcgcttccggggtttctccgcccgctgtttggcctgtgtcaagcgcccggacggacgcgcctttcatccggacataaaccgtaccggcatcatcgcacatatcaatgtcaaattttcttacgttgtcatctgctttgctgccttctgtgtaccggatatatgaccagatatgttcaggacacggcccgaacacttccacttcctgcatcgcaaacggcagagaaagctcgtggctgtctgcatcgtcatgtattgagcggacaagcagaccgacggaggcgtgaaaagcggcgtccatcatactcgggtgaagcgtatactgttctttattgtcatgtacggcagccgggagtgaaatacgggccaataatcggtcttctccgatcagcaattgctgtacgcctctgtatgcctctccgtaatccagaccgatcttctcaaaagcaccgtaacattcttccgcagtcacggtccctgaattgcaggaagctttgacagactcgatatcaatctgggcgctttccggttcggtaatgaccgcttcaccctggctgtgaataaccggatcttcgccgttttctgcctcactgtatatttcataggtaatctcaccattatcttctgggtaaagggcaatatgtatttccttcggtttgtcttcaatcatgaccggccggacccaaacaacctgcctgagtgtgacgctatggtctttttccgtcacggcagcagcctttttaaccgcctctctggccatttccaaataggcaacgcccggcagtattttttgtccgttgacgacatggtcagataggaaaaattcatctccagtaaaaagagacgtgaagcgctgctgcgaaaaatctgacgtgttttcttgtaaaagcggatgcagcactgtgcctgacgggcttttctcctgttttttctgctgcggaatccaatagcgttcttttgcaaacggatacgtcggaacgcttgttttacgcggtttacccgaagcgtacagcctattccaatctattattttcccttctgcccataactcggcaagccgtatcggatcatccgtctcgggagcggtttcgctcagttccggcagctcggcttgtccgcgccaaagaccggggatgttttcgtttccttttacgaaatcattcagcttttctttcaagtcgcggatgtcatttacaaggaagacagctctctcttccattgcttcacgtcctgtctgaagtgtataagccagttcagacagcaccgtcttttctgaaagcgatcgggctagtttttccgcataggccagaagcctgtctttatttcttgctgacagcgggatgagttttgctgcattgttctcaggtgcaggcgctttttgttcaggctgaatgtattcttctaaaatgatatgggcgttcgaacctgatgcaccgaaggaactgagtccggcccggcgcggataatgtgtgacttttccgttttcttcggctgccggctgcttccacggagcagtctgctgctgtacgtaaaaaggagatccctcaaatttcaggtaaggatttaattccgcagaatgcagtgatttgacaagcgttttgtgatgaagctgcagcgccgcttttgttaacccgctgatccccgccgctgattctgcgtgaccgatatttgatttgaccgaaccgatggaacaaaattgctgatcctgcgtcccttggctgaacgcttttgacagaccttcaatttcaatcgggtctcctaacgaagtacccgtgccatgggcttccacataactgacggtccgcgggctgatacctgcttttttcagacaggccttaatgacttctgcctgtgcagcaggactcgggacggtaattccgcttactttcccgacgtggttaacggcgcttcctttaatgaccgcgtaaatgcggtcgccgtcttgttcggctttttccagcggcttgagcaagaccgcaccgactccttctccggaaacgtagccgtccccgccctcgccgaatgtgcggcagcggccgtcacttgagtgcatccctacgcttccgtagctgagatatttcgccgggtgcagcgacaagttcacccctcccgcaagcgcggcttcacattcgccgcggcggatgctttcaatggccagatgaacggcggtcaatgatgaggaacaaacggtatccaccgcgatgctcggcccgtggaagtcacaataataggacactctgttggcgatctgcgcataattcagtgaaaccggaaaaggatcagcttcagataattgttctgcgccgattaaggaataatctttatgcatcacccctgcaaatacgccgatcggatgctgtttctcccctttattccccagcgtttcaggcgtataccccgcatcttcaatcgtttcccagcatgtttctaaaaacaggcgctcctgcggatccatcgtttccgcctcacgcggtgagattctgaaaaactgcggatcgaaacagtcggcatcgtcaatgaaaccgccccattttgatactgtttttccagacggggacgttacgttttgatatgttttccaatcccatcgggacttcggaacttcagtgatgcaatcggtgcctgccttaaggttttcccaaaactccgccacacttttcgctttcggatagcggccggccattccgataatcgcgatgtctccggtgtttttatgatgttctggcgcgtccggcgcttcagcttcagatcgtgatgattcggctgcacgttcctccgcatattcaaatgaaccagtctttttcagaaaggctgcgagttcttttatatttgtatattcaaagagaagagtgggcgcgaggtcagcacccgtctttttactgatatcctgtacaatctcaagcaaagaagatgaattcagtccaagctcgtagtagcctgcaagaacgtccagcgtctcccaaggttgcccaagcttatcagccaaaagcttctttaaaaacagaatgatgtctttttcatctgcgctttccggctcagctgcagcctgttgattctgttcggctgtattcgcgtcttcgagccgaaccgcttttcccgtaatgtttttaagctccgccaccttttgtccggatcggctgaagtactcgatcgtcatcgttgtgagttctttttcctgacggacgccggaagcggcgatacgcgccgtgcactctgattgaagcctgtcagcggccgtgaacgattcataatataaaggcaggtgaagccggtttgtttctgaaagcaaaccgctccccccgattccgctcgcatccaaaagggccggatggaataaaaagaaatcttttccttcttcgcaagaaagctcagccagcatgccgctttctgtttcgtacaattgtccatttgatttcatcatgccggaatgaaccaagtcatgatccagacagcggttatacatatcatcaagattcagagacctggctgactgcttcacatcgctgaaatcaatgatttcgtcaaatgtgacagcgtctcttttcaccatttcagccgtcgcatattgtatattgtctgacagctcgtcaccttgctgtttctgccctgaaagggagatgagccactttccatctccgctatcagaacattgaatggtcagaatgattgcagccgtttcactgacggttaaaggctgataaatcgtaacgtgcttcaattcaagctcattgtatacataaccgtgttcctgaaaaacctgataaatcaaatcgatataagcaagaccgggcaataccgcttcaccaaagaccatatggcccttcatgatgggatgatccagtgagatattgattttttccgatatcattccttcccactcctctcttatttaaatgctttccaaaacatttttttcgcaggaagctcttgtttctccgctcgtacgtcaggttcttttaccagagccttacgtcttaatgacggtaccggcagcggctttcttttcattcgggtatctttttcttcccaagcttccagaatgacgtgggcgttcgttccgccgtcggcaaagcagttgatggctgctgacggtctggctgcatcccattcgccggctgttttatgaaagtgaaaatctgtctttgttatatcaaaatgcggcatcggttcgtctcctgagagaaacggaaccgtttgtttatgcttcagcattaatacgactttaatgaagcttgcaatgccttctgcgcaaagcggatgcccgatgttcggcttgattgacccgatgccgagcggaacatgctgacctgagcggtatacggattgaatcgccttcagctcaagcaaatcagtcaccgcggaacccgatccgtttgcttcgatataagtgatgtcttccggctttttgccgcttttgagaagcgcgctttgcataacgtctttttgcgcctgcatattcggggctgacgggcctgccgttctgccgtcattgttcatggcggcagccttaatgaccgcgtgtatcgtatcgccgtctttttgcgcctggcttactgtttttaacagcaccatgccgacgccttcaccgaggaccactccgcctgaacgcttgtcaaatacgtgaaatgccggtttctcgtttaacagcccgcgctcttggaacatccggtgcgccgcatccgtgttcagcaggctgacgccgccaactaccgccgctttgatatcgccgcttctcagtgcctgaacggccatgttcattcctgtcaaagctgatgaacaagccgtatcaagcacgatactcggcccgcgcagatcaaaaaattgcgaaacgtttgccgctaaataattctgcccgcccgcaacaatcgggttgcgggtattcgcaagactttcaggatcaggctgatgctggctgcggcctccgatatacacaccggcttctatgcccttgatttcttcacgggtatagccggcatggcaccaaagtttcaagctctcttccagcaccgccaacgcctgagggtccatcgctttcgcgtcgttttccggaatgaaaaagaattcggaatcaaagtgatccatattgtcaatcaatcccgcaacatattgatttgcatatccgaaacgttccgccgggacggagccgattgcggacctgccgcttctcagcaagtcccaatattgttctaacgattccgctcccggaaaacggcagctcattccgacgacggcaatgtcttcagttacagcagcacgcttttgctcagtgtgaaccgtttgtacggcagccggaaccaacatttccgtatcaggttcctccctttctgcaagcagcggctgcccattggatacaagccattcggcaaacgcgtcaatcgtcggatgttcatataaaacagacggatctaagtcctctttgagcgcttgattcatttgctgtaaaagctgcgctaaaatgatcgaatcaaccccgtaatcctgaaacggttcgtctgtttccagatcttccggagcgattttcagctcatcggaaaacagtttcacaagccatgccttcgtatcaagaagcagttctctgtctgaatgtttttccgcgtctttgccgtttattacggcttcagtctctttttgttttttctcttgacagagcagcctgtcgggatgccattcgctccgatcaacgatagccggcagaacggacgggcggatgttttcagataaaatgcggtccagcaagtcaagtccttccgcgttggacagtcccagcagcccggtctgcttcaggttttctgtgcggatttcacccaatccggtttccttccagttcggccattgaatgctgactaacggatattgatgctgatgagccgccgcgaaataatccatgtacgcatttgccatcgcataatccgactgtcccgccgcgagtgccggaacgactgcagatactgaagaaaataagacaaaaaattgcaaaggatcatttgtgaaaaggctgcttaatgtttgaagcccggcgactttcggttcaagcacttcttgtatgtcgtcggcagtctttctgataaacgccggatttactgaattaaccgatcccgcacagtgaatgacgccgccgatcggtcccatcgtgcgccggatcgtttcaatttccgctgccgccgcgtcatgatcagacaatttcagactgatcaccgccacttgcactccttttgcttcaagctcttcaatcgcccgtatcttctctctcagcctcatattaacggctgtccgtttatgacggggaggaatcggctccctgcctgtcagcactacttttttcacgccgtgtttttctgtgaaatggcgggcgcataagagacccagtcccctcgtccctccggtaatgaaaagcacatggtcttcaggaaacggtgctggcttatgttctgctcgcttcccgcttggaatctcgctgaacaaagcacggtatctttgtccgtttcggcggcagacttccggttctgtgctgtccgccgaaaattcatctgcaatctgtttggcaagcgtctgctgatccgtatctgtatcggtatccatgtgtctggacgtcacgttttgatactcattttgaagcattctgtacaggccgctttttgccgctcctgcaagatgaatcgttttctgctgaaatggctccaagccttttgttacatatagcagcgtcagcggccgcgcttgccggcggcttgtatcaatcagagtctggagccggctgatcccttccagtgaagggtcttcgtctccgcatcccgtcagatcgattacgccatctatgtgattccaatcgctagctgcagtgtcagcggccgggagaatgaacgagtcagcgaaatgcttcgcagtctcttcggcaagttccgctgttcttgcatcagccagaatcatgaccgtcctgccgcttttctcaccggccgaatcgatctcacacggaacccattgcttttctaaaagcacagccttgcgccggtcttctgtttcctgcggtacggctttcggctcaggcagccagtacggctccttcgcaaatgggtaagccggcagactgattctgcggggtttttcgccttgatagagtctgtcccagtccgtctgaagccctttggcccacaattccgctattttggcgtattttttcttatcgaaccacgacctgacaagctgcttcagatcatcgtccgtttcaaatgctttgatttctttttttgccgttttgatgtgggcttcatatatcccttcacccgtatttccgtttacaaaatcggttaaacggctgatcagttcttctctcgaaccggctgtaaccgcaagacggtaatccatcgcatcacgcccggtctgaagcgtgtatgccatatccgaaagattgatattctgattggcttttgcaaattcgatcacagactcagcataggtttttacctgcggcgcttttttcgccgacagcacaaaaatgtttgtctcatcagacttgcggcttccccggtctttcggctgatactcttcgataacgagatgagcgtttgtgccgctgtagccgaatgagctgacgcaggcccgccgcggtgctccgcctgtttcccaaggtttaagttcggtattgacaaataaaggcgagtcatcgaaatcaaaatgttcattcggcgtgctgaaatgaagggtcggcacaagctgctggtgcttcatcgacagcagaaccttctgtacgcttgctacacctgccgccgccgacgtatgcccgatattcgatttaaccgaaccgatggcgcaaaattgtttgcggtccgttttttccttgaatacagaagataaggcttctaattcaatcggatccccctgctttgtgccggtgccgtgcatttccgcataggtgatgctctcagggtggatgttgtgcgcttcatacacttgacgctctaaatccatttggcttttcgcgcttggtgcggtaatgccgttggtttttccgtcttggttaattccagatccgataatgactccgtaaatatggtcttgatcggcttccgcatctttcagcctcttcaaaacgagcgcccccgcgccttcgccaggcacaaatccgttcgcactgttatcaaatgctttacattggccgtcaggagacagcattccggcttcacacatgctgatgtatgattcaggcgttaaatacaaggtgacgccgccgacaagggccatgtcaatttcatgattcaacagcgcctgacgcgccaaatgagtcccgacgagagatgaagagcatgccgtatcgatcggaatggccggccctttcaaattgagataataaggcaggcgggccgccgcgatgctgaaactgttgcccgtcgcgcttcctcctgtctgatgtttgtttaacatcattccgtattcattgttcataatccccaaataaacgccgcaattttttccgtttaattcttttgagctgtaacccgcatcttcaaaggctttaaaaccttcctgtaaaaatatccggtgctgcgggtccataagttccgcttcagacggagaaatattaaagaacagcggatcaaactcttcaatgccgtcaagcataccgattgatctgcagtatactttgcccttcttgtttaaggccggatcatagtatttgtttacatcccagcgggaaagcgggatgtcgcggatagcgtttttcgcacgggctaagttgtcccaatatgcctttaggtccggcgcatccgggtacttgcccgacatgccaactatggctatcgcgtccgctatctcgtctttaggctcccgtttggcctgcaccggttcaggttccttttgaaccgttaatctctccggctcggcaggtgttttctcctgcggggcggcttgctgtgtaagcggctttggacgtacgggaaccgcctgtttttttctgccgcggacggacggctgcgtacgcagaaaatcggcaaattgacggattgtcggataatcatacactttcgttacgttacagtccgtgccgtaccgtttattgacggcctttatccattcaagaccggtaatcgaatccataccgaggtcaataaaggcctcatcaatatccacttcatgccgctccatgtacaatacatcagccagtgcttttgataactcgtcatgcaccgcttcaatcggttcttccggttcggcggaagctgccgtttcagacatcgcctccagaatatccgcttctgcttgtatcacatgctgcttatgagcgtttaaaggctgcagcagtatgtttgacggtttttttacggcctctgttttctgcggttcggctgcttcctcaaggatcggttctgtcccgagttctttttgcaagaaggccgcaaactggcggattgtcggataatcatatactttcgtcaccgtaagggacgtgccgtacgctttattaacggcctttatccattcaagacctgtgattgaatccatgccgatatcaataaatgtgtcatctgcgtcgatatcgtcggcatccatatataacacgtccgccaacctttccgttaattcggcacttactttttcagcggataccgccggacgggaagcagactgtacggttcttttcggtttcgcgccgctcaaaggctgcaatgaaatgtttgacggtttttctttggcagtctcctcgtgaagagttgctacttcaatgaccggttccgggacggccgccggtgcgatcggcgcagactgtgtttcggccggtcttttgacagctgcatcagctgatgtgtcgatccaataacggtcttttgcaaacgggtaggccgggagactgattttttgcggtctgcccatttgatacagcttatcccaattcagcggaaggcccttcacccaaagctctaatacctttgcggctttgcctttttcaagccatgcctcaatggttttttccatgtcctcatcagccgcaaacagcgccatcgtgtctttattctgtttgacttgtccgcggtagagccggtcaattgactccttgccgcccgtaaattcgtcaagcttttcttcaagctcgcgcaaattgctgacaatcattccgagacgctcttccatcggttcacgtccgatttgaagcgtatatgcgatccggctcagatccgcttcttggtaacgcccgctccgcagcgcatcaagaagacgttccgcccgtttttgaagcctttgttcatttttcgcggaaaggacgatcatcgatggatgaggagcggcaaaagccgtctccttatcctcatcagcggtatattcttcgatgacgatatgagcgttgacgcccccggctccgaatgaggaaagccccgcggttctcggcagttctttatttattccgttttcatttatgaccggtcttttccactcttcaagcgtctgctgcactataaacggcgtagcgagaaaatcaatattcgggttaagcgtccgggaatgcagtgacggtgcgagcttcttatgtttcatttgcaggagcaccttcgtcagacccgcgatgcccgccgcgctttcacagtgcccgatattggattttgctgagccgatggcacaaaactgtttatcttgtgtttgttctgaaaaggcttttgtcagacccgtgatttcaatcggatcaccgagtgaagtcccggtgccgtgggcttcgatgtagctgactgccctcggatcggttcccgcgtcttttaacgcctgtttgatcaccgcggcttgggcgttcggattcggtacggaatacccgtttgtttttccatcatggtttacggccgttcctttgatcaggccgtaaatatgatcaccgtccgctttcgctttagaaagcggcttaaggagtaccgctcccactccttcaccgggcacataaccgtccccgccttcaccgaaactttcacatctgcctttgcttgataaaaatctgttctggccgagcatcaaatatttattcggatgaacggatacattgacgcccccggcaaatgctgtctcgcattccccgttccgcaagctttggcatgccagatgaatggctgttaaagaagaagagcacatcgtatccagcgccatgctcggaccgttaaaaccgaatacataggaagccctgttcgcaattgatgacggatttccggtcagcgcaagcgattttccgcgcgcctgttcttcggctccgtaaagctgatattcctcatacatgacgcctacgtaaacaccgacattggcgccaagcaaatcacccgatttttccgtgagctttttgcgcgtgtaaccggcatcttccatcgtttcgtagacacattgcaggaataaccgctcctgcgggtccatcaattttgcatcccgaggcgaaatagagaagaattgcggatcaaatttgtccacgtctttcaaaaatcctccccattttccgtacgtcttgccttctttatctttatcagcgtcgtaataaagactgtgatcccagcgatcgtttggaatttcagttatgcagtcagtgccttcactcaagttcttccaaaattcctgaagattttcggcttgcggatatcgtcctgatataccgataatcgcgatatcttcacgctccgtcactggatttttccgcgtgtctgtgcggacttgcgcaaagccttttttggcttcattccgtttggaaacgggctttatttcggctttttcagacagcgccggtttggctgcagaggtttcttctgttttcagcccggtcacttccagcagcgtgtcccggtgtgctttcataaaatactgcgccagcgattcgatattctgatattcgaaaaacaatgtttttgacaatgaaccgaagctcttttccagccggcccgtcaaatgcataatcataatcgaatcaattccgtaatcttccataggcgccttggcgtcaattttgccgacaggaagttttgttacttccgaaagcacatgtttcaagaaatgctccgttttttctgcaagcatgttctctccgcctgccgtaagacctgccggttcttccgtttcgctgcccttatccggctgatcatccgctgattttttcagaaacgcccggatttttgcggcgtagccttccgtcaccatgatttgggatgtgtttgccgcccacccgcggtacaaagcatggatgccgttttctgttttcatagggaccatgccgctttcttttgtcagcatcgcttccgtttcagcatcaaccgtcatgccgccgtctttccaaagcggccagcagattgaaagggtgtgtccatagcgttcatttcgggcttttttacggtttcttttttcactgaaggcgttcatgaacgcattggccatcgcataatcagcctggcccgcgcttccggcgcttccggctccggaagagaaaagaatcagaaaatcaagctcaatgtcctttgccgcttcatcaagatgaaccagtccggagactttcggcgccagcacatcacggatttcacctttgtgctttttcagaatataattgtcttttatcgttcccgcgctgtgtatgataccgtttaatccgccgtactgtcggcagatgtccgctgtgagcgattgaacttcttgtttttccgtcatgtccgtttgtttgtacacggcttgcgcgccgagatcggacagttcttgcagctggtcttttttacggttatccaacagagaacgccccgttaaaataagcacggcgtcttttgcatgtcgggcgatttctttggcgaataaaaatccgagtccgcccgcaccgcctgtgatcagataaacacctttatccttccacggcttttcggcgccgaactgttcaagccctgtttcctgccattgtgccgtatagcgcttgccgttttcatagcgaatatgtttgtcatcaggatgagcgctgcattcttttacatatcgggacagcgtgtctgccttgacgtccggctccaattcaatcagctggccggtcaggttcgggttttcaagcgccgctgttttcaaaagccccgttaagccgcaaaggagctgcgtatccgcttcttgaggcacgacaatctgaatgagctcgcgcccgccggaatttgaagcgagaattttcttcacttcttcgaacgcctgaagcgcacaagcttcaaaccgttcgtcttcactcttatgctgatcacggagcacgtgacagctgaagtctgtctgtatgctgttcatttgatccgtaaaccggtctgatatcatcacgtgacgggctttgaaatgagtcggcgctttttcatgtacagcggccttctcttcccatacgtgttcaaaaaatagtgtatctgttttatccgtttcaatttcccgtgcggaataaccagtcattttcacacatacattgccttgttcgtcacatacatcaatatccagcttctgcacggcatcttctggcttgctttcgccgctgtacgcaatggaaacccacatatcgcttttacagcttttcaacacatcaatctgttcgagagcaaacggcagcatcggccttatgtcatttccgtctctgtcaagcattaacccgattgtcgcgtggaaagccgcatccaaaaggctcggatggaggacaaactgatcttttgtatgagaaatagatgacgggagtgagagcttcgcgagcactttgctgtcttttgcatagatttccgtgaccgctttgtgagcatccccgtattcaatccccatctgtttgtatgcctgatagcaagcgtcaggtgtgatcagacggcgtgactctcttaatttgtcaatctcgattttggccggttcgccccctcggacaaacgccgcgcttccttgcgcatagagaacgggctcttgttccgaggaagccgattcaccgtaaaccgtgaagcccatctccccattttcttcatcataaagacggagatacagttctgcggattcatccgccgctgtaaacggacgtatccatacgacgtttttcagacggactgttccttcttccttcgtttctgccgcgtgttcaacggccgcccggaccatttccagataagccgcgcccggtaacgtccgctcgtttttgacgacgtgatctttcaggaaaaattctccgccgctaaaagaggaccggaaacgaacacctgacatgtttgatacattttcatgaaggagcggatgcagcatgcctgcccttttttgcggcagcgattctcttttctccgccttcggcacccaataccggattttttcaaacggatatgtcggcaggctgatccgattcggtttgttttcaccgtacaagagattccaatccatcgttcctccgccggtccacttttcggcaatcatctccagactcccggaagaaagccatttatgtatcaagtccggagcaagctctgcctgattgcttttatcggctcggttccgccagcatccgctgaccgttttacccgccagaaagccttccagccgctctttgagctgtgtcatattctgagcggtgaacgcaacccgctcctccatctgttcacggccgatctgaagtgtatacgccgcatcctcaagcggcaggccgggataaataaatgaagacagcttcgcaacatactcttttagccgttcttcattccgggcggaaaccgggaaaatgaaagtctgttcttctgccggttcatacgctgttctccgtgattcttcagggataaattcctccagaatgagatgcacgtttgaacctgtcgccccgaaagaactgatgcccgcacgccggggatatacggtctcgtttccgttttccgtcactgatggctgctgccatgcttcggtatgatgctggacgtaaaacggtgattgttcaaaatctaaatacggattcagctcctcggaatgaagagacggcaccaaagttttatggtgaagctgcagggcaaccttgcttaagccgctgatgcccgccgccgattccgcatggccgatattggacttcactgatccgatcgaacagaactgtttgtcctgtgtgtactggcggaacgccttgacaaggccttgaacctcaatcggatcgccgagagaagttcccgtcccgtgcgcctcaatataactgaccgtgcgcggatcgatgcccgctttgtccaggcattcttcaatcaaatcggcctgcgcgacaggactcggcacggaaattccgctcactgtccccacgtggttgacggcactgccctttatcaccgcataaatccggtctccgtcttttaccgcctctcgcagcggttttaataaaacggcaccgattccttcagccggtacatagccgtctccgtctttcccgaatgtatgacaaaccccgtctgttgaaaacatgtcccataaaccgtatgtcagatatttattcggatgcagcgacaagttgacccctccggcaaccgccgattcacattccccgcgccgaatgctttccgcagcaaggtgaaccgcagtcagcgaggatgaacagaccgtatcgacagccatgctcggcccgtgaaaattgcaaaaatatgaaactctgtttgcgatttgcgcataattaagagaaagcgggaatacatgatcttcagaagaagcttcagccccgaccaacgtataatccttatgcatcacccctgcgaagacaccgacgcgctgcctcttattccgtccgcgcgcctctgcgagcgacttcggcgtatatccggcatcctcaatcgtttcccagcatgtttgtaaaaacagccgttcctgagggtccattgtttcagcttcccgcggcgtaatccggaaaaattggggatcaaagcaatccggatcatcaataaatccgccccattttgaaatgctctttccggaaggcgactttacattttcaaaccggcgccagtcccagcgagactccggaatttcggtgacacagttttttccttctttcaggttttcccagaattcatgaatattttcggcctgcggatagcggccggccatgccgataatcgcgatatcttcatcttgcggaacactgcttttccgtcttctttctgtttgcttctcaacctgcttctctatttttgcaggagacgcgctgaaatggcttccgtactgctctgtcaggaaagccgccagctctgatgccgtcgtatattcaaacagcaaagtcggagaaagggtttcgccgattttttcactgatcgtttcgacgacgtcaagcagtccggacgatgtcagccccatttcatagtagccgacttgagaatcaatctgttcaagcggcttgccgattttttcagccatcagattcatgacataccgttctgcttcctcatgcgggtgtccgccttcaagcgatgccgcaacttccggtaaaccgactttttcaggaggcttctcagcagtctttcggtctgtattgatcagctcggcatcccgcacgagcttgcttgtgaaatctttcagctcggctacttttcggccggatgtgttaaaaaactccagtgtaatgtaaatgagctctttttcctgccgaagcgacgaacgtttgattctcgtgatgcagccggcctgcaaaggttcggaagctgtaaaagattcgtagaaaagaggcagaaacagcctcttttccccatttaacagcgaggagatcaataggtttgcgccgacgccgcttccgtcaagaagagtcggatggaacaaaaacccttcggcctgtcccatcgcgtcttttccgagcgatacatcaaaggtgacgccgtcccgctcctcaaacacttctccttccgctttcatatatccgctgtgaaccaattcctggcttctgcattgggcatacagctcatttaaatcgatggtgcgttccgcctcgcgtttgacagagtcaagatcaagcgtgtcactgaaaactgcgggtgccgtctcgtgcatttccgctttgacgtaaatacgttcttccggctggactcgtccgccgctgacctcagccccttttgcggtaagtttccagcgcccttcttttacctttgtacattcaaccgtaagcttgacggcgctgtcttctttcgcgataagcggctgatatatggataaatggcgcagctgaagcccgtcgtatgaatagccgcgctctttaaaaatctgataaaacatatcaatataagccaatcccggaaggactttttgtccgtaaacgtcatgatgtaaaataaacggatttttcagcgataaagtgatttgcttattgaagttcttcacgttaaacctccacttcataggtatcccagatgtttgccgcagctttttcgttcgtttcttctttgctgtccggcgaaatcagccgcttatttaatgcaggcggtgttaaagggtggcgcttgattcggcgcccttcgtctccctgccacgcttccacaatgacgtgggcatttgttccaccgtcggcaaagcagttaattcctgccgccggcattggtgacggccagtctgccagagtgcggctgaactgaatattggccttttctctatcaaaatgtgtgttttcatgctcacctgataaaaacgggataaagctcttttctttcagcatgagaacaacctttatgaaacttgcaattccttccgcgcaaagcgggtgcccgatgttcggtttcacagatccgattccgagcgggccggcgtcttttgaacggtagacggattgaatggccttcagttctaacagatccgtcacgaccgtgcctgaaccgttcgcttcaatatgagtaatgtcttccggctgttttccgcttttttcaagagccgtcttcatgacggatttttgcgcttccagactcggcgtagccgggcctgccgttcttccgtcattattgacggatgccgccttcactacggcataaatagaatctccgtctgcaatggcctgagacacggtttttaaaagaaccattccgacaccctcgcccagcacgactccatcggcgcgttcgtcaaatacatggaacgactgcgctttacttaatatgccgcgctgttcaaataatttatgggtttcttctgattcaaacaggctcacaccgccgacgacggccgcttttatttctcctgttacaagagcctgcacggccatattcattccgactaaagcagaagaacaagccgtatcgaggacaacactcgggccgcgcatatcaaaatattgagagagattggcggccaaataattctggcccagcgcgacgatcgggtttttcgcatccagcagtttctcttcacccggtctgtgacggctgcgtcccccgaggtacacacctattgcttctccctttatctcatccggcgtatagcccgcgtgataccacaggttaagacattcttccagagcggccaaagcttgagggtccattgcctttacatcttcttcagccagtaaaaagaagtccggatcaaattgatgaattccatcaagcattcccgcgtaataaggcgtcttcaccccccatcgctcagccggaacaggaccgatagccgaacggccttcagccaaaagcgaccagtacgcctctaaggaagccgcccccggaaaccggcaggacatgccgacgaccgcgatatcttcccggtgaatctgtttttcggccgcctcttcttgcaccttaacggcttgtgttacaattaccggctcagccggcttcttcataacaggctcagccgccgccaaatcaaaccgttctgacaaaacttctgtatacccttcgagaagccattttgcgaaagattgaatcgtcggatattcatacagaatggacgggtcaagcgatgccgagagattccgattgatccgctgcagaagctgagcaaggataatggagtccactccgtaatcttggaataatacgtctgtctcaagctgatcctggtcaatccgcagctcttcagaaaataattctttcagccattcttctgttttccttgttaattgagcgttgtctgcggcggtatcagcggttttttccgccgattttaccatagccgggctcattggctgatcctgcctgctccgccgcaggaatcgctccggcttccacagcttaggattcagaacggccggcagcaccgggccccttgctgattcaagaagtatgccgtcaaggagctgtaatccttctgcattcgtgatgctgtatagcccgctctctttataagctttgttcgttacttcgcccattccggtttctttccagttcggccactgaatgcttacgatcggcagctgctctttgtatgagtctgcaaaatagtccatatacgcattggccatggcatagtcggcctgtcctgccgaaagcgccggtatcgcagctgacacagaagagaacaagacgaaaaacttcagcggctcttcgctgagcacactgtataacgcctgaagcccctctactttcggctcgagcacgcgctgtatgtcttcatcggtttttctgatgaatgcgagcgtctctttatcggtcacacccgcgcagtgaatcacgccgccgataggtccgagcgtctgtttgatctgactcaattcctgtctcagcccggcttcatcagctaacgggactgacaataccttcacttgtacacctttggactccaagtcgagaacagcttcaattttcgcttttacagaagccgtcaccccattcagtccgcccgtccactcacttcgcggcggaagggtctcacggcctgtaagcaccagttttttcactccgtaatgttcggcaaaatggcgtgcgcataaaagaccgatccctctcgtccctccggtgatcagaagcacatggtggtccggaaaatcaattctctcgccttgcgtattcatattttctgaaccgctcaatacggcgcggtagcgcaagccgtccctccggcaaacttccgcgtcatcagtacgggcatgaaactcatcggcaatctgcttcgccagtttgtcatccgaaagcgctccttcaagatcgagatgccttgaagacagatgactgtactcgcatgccagcattctgtacagcccggcccgttttgctcccgttatttgattggcctttttccccattgactcaaggtctttcgtgacacaaagcagtgttatcccttctttatgcccatgctcaatcaattgctgaagccatttgataccggtcatatctccagaagcttcttctttcgctgcaccgagaaggtcgatgactccgccaaacgcctgccagtcatattcacctgtaaggtctgatgttgtgataatacggtgattcggcatatgcgctgcgatctcttctgcgagattgatcgtgtccccgcctgtcaaaatcgcaacggaacgtgggcacggttcacgcagttcgagcgggctcggttcccattgttttgtcagaatacgtttcatccgttcctctgtatggaccttatttttgtcaggattctcaggcacccaatacgtgtcttttgcgaacggataagacggaagactgagtaaacgcggcgtacccttttcatacagccggttccaattcaacacgccgcctttcacccatacctctgccagcttggcgaattttccttttttaatccaggcgtcaatgacgatgtccatatcttcatctgccgtgaacaaggcaaacgtatctttattgcggtgagactggccggtatacagcccggcgatgtttttctcatttttcgtaaatgcttccagctttgtttccaattccgccatcgtcgctgcaagaatggccaggcgctcttccatttcgtcccttccggtttgcagcgtataagcgacgcccgccaagtcttgatctgtatacggcgtttgacggatcgctttttgcagctgctgcgcctgttcgaacagtttttcttttgatttggcggacaaaaggatgattgccggattttccgggctgtgctcaggcagagcggctgctttcgggacatactcttcaatgacgatatgggcgttgaccccgccgatgccaaatgagctgaccccggcccggcgcggaatggcatttccgtttctatctttcgctgccgtccattcctgattttcccgcacgatgtagaaaggactgtcatcgagctgaatgtacggattgatcgtctcgcaatgcaggcttttcaccagcgttttgtgcttcatttgcaaaagcactttcatgacgcctgatactcccgcggcaagctctaaatggccgatattgctcttgaccgaaccgatgccgcagcggtgatcggagacttcaggctcttgatttgttttcgccagctcgtgaaacgccgctttcaaaccgtttatttcaatcgggtcgcccaattccgttcctgtaccgtgcgcttcaatatacgtgacggtgctcgggtccactcccgctttccgatatgctttcaccaataaatcagcctgcagtttcggattcggcgaggttaacgtattcgcccggccgccgtggttttcagccgtaccgcggatcacgccgtaaatcggattgccgtcacgttctgcatctgtcagtttcttcagcatcagaattcccgcgccttctcccctgacatacccgttggcatctttggagaaggttttgcattttccgtctttgctgagcatgcctgctttgctgtagctgatatgcgcttcttccgtcagaatcgtgttgattcccccggcgatcgccatgtcgcattctccgttttctatagcggataccgcccggtgaatcgcaacaagcgagcttgaacatgccgtttcaaccggctcgctcggcccgtgaagatttaacaaatagcttaaacggttcggaccgatggaaggaatcatgctgcctgtcgccgcatgtccttccggcgcaagacctgcccttgtgaacaaatctttataaccggtatttccggtgccgataaagacacccgtatttgtgccggaaaggctttccggcttacagcccgcatcttctatcgcccgccatgcataagtcaataacagccgctgctgcggatctaaatattgggcttcccgcggtgaaatcccaaagaacagcggatcaaattcagctattccgtcgataaagccgccccacttaatattcgttttgttcctttcaagattcgggtcgccatcaaacgcttgccaatcccagcgttctttcggaatggttgtgatagaatcttttccttctttcagattgcgccaaaattcctctatatccttcgcgcccgggaatcggccgctgattccgacaatggcaaccgggttcaagcggcgcggctcttgtgtcgctgccctagcgttcatcaccgttgcgaaacgctttttccgatgcgttttcggtttttgggcttttggctgctcttttttcggagactccttcttcttttcgccgaaacggcccggatgctcttttgccaaatatccggcgagattactgatcgttccgtactcaaagaaaatcgtcggcgccagctccagctgatacgcttcatttaattgattcgtaaagacggtaaaggatacggaatcaaaaccgtattcactcagttccgtatctgtatcaatgtcctcacggtcaacttttaaaatgctgcttaccatggctgtcaaagcggtgtgaagcgcttgaagagattcttctgcatcgtgtttttcttccggctgaaaaggaagacctctctctgtttcatccgacaaatactctgctaaactgcggatcgtcccgtgctcgaagaagatcgtcggtgccagctccagctgatacgcttcatttaattgattcgtaaagacggtaaaggatacggaatcaaaaccgtattcactcagttccgtatcaatatcaatctcgtcttggccgacttttaaaattgaactgaccaatctgataagcgcaccgtgccatttgtctcccgaaacggcggatacaggttctattttctccacctgcggcttttcagtttcagaaacggacaggaacgactgttttaattttgctgcgtgtccttcagctgctaaaagctgcggcttttcctgagccattccttcataaaatgcagccaggcctgacgccttttgaagcggaaccatgccgaaagcttttttcatcattctttccgtctcgtctcccgcctgcataccgccatctttccacagcgtccagttaaaggcgatcgtttttccgtgccgcaggccattctccgtaagggattgcctgtaagcggcgtatgcatccataaacgcgttgccggcggcataatcagcctgcccgacattgccgagaacgccggaaacactggagaacaatacgaaaaagtcaaggttgcagtctttgctggcttcatctaaataagcggtgccgatcactttcggatcaagcacttcccagaactcttccttcgttttttgcagcaggaaacggtcttgtatcacgcccgctgcgtgaataattccgttaagctccccgaattccgccgtaatctcttttatcagcgcttcattttcccgccggtctgccgcattcagctttttgtagacgacatttgcgcctgagtcctgaagcatagcaagctcacgctgtttggcttctgccagatttgagcggccggtcagaatgattttcgggtgttttacgcgaccagcgatttcttttgcgaacatcaaccccaggcttcctgcgcctccggtaatcagatatacgccttcgtccttccagacggcgccgccacctgcaggatgcatttcttcccaagccttcacataccgtttttctcctgtataacggatatgtttatcatgcggccgatggctgtcgtttttcagtttttgagcggcagccggcatttcgccgattgattccatctcgatgagctgacagtcaagttttccgtattccagctcggctgtttttaacaaacctgttaaccccgcaaacaattgctggctgccgtctgctgaaataacagtctgaatcagaatgcggccctgccttttttcgctgatgatccgccggatgtgttcggcgattgtctgcgcgtagccttggaagcgttcagcggctgtttctccctcaccttctgcaatcagcagctcggcgtctttcaggccggatgccgcttcatcttttatacggcaggcatcttcacaaagtatgatcaaatgctcatcagcatggacagaagctttctcggatgcggcggcttctttccaaaccggtgcaaacaagaccttttccgagcctgatggccgctgagccgattctgcatcgccttcaagcactctcgtagagaatcctctcaccttcacgcaaagcgctcctgtttcgtcgaacaggtcaatgtcggctttctgcacggaatcaccggtttgatatccttcgctgaagcgtgcatgcgcccgcatagtcggtgtgcatggtttgatgacttcaaggtattccagcgcaaacggcagaatcagcttttgtccggaaaactcctgcataatgcagatcgtcgccgtctgaatagccgaatcaatgatgctcggatgaagcgtaaattgtccgttcgtatgagaaacagaatccggaagctgtatatccgaaagcacttctttctcgccgataaaggcggacttaatgccttggaaggcttttccgtggaacatccccctgctccggccttcccgataaaaggccgccggatcaagaatgtccgctgtgcatctgttttgtatggcagaaaggtcggcctcaggctctcgttcagcctttatgatttcagcccgtccttggctgtgcagcacttcttcatcgtcagcgtttacgctgtaaatgtcatatgagatgatgccgtcctcttcaggaaacagcgcgatatggacttggcgctcttgttcgtgaacgacgatcggtttcatccagacggtatgatggagcgttattctgtcttggtcttttaataagccgccaagcgcccgttttaccgcttcataagacatttccaaatatgccgctcccggcagcaccgctttttccctgaccacatgatccttcaggaaaaattctgagcctgtaaaccgtgagctgaaccgctgaacggccaaatctgacgtattttgctgcacaagcgggtgtaaaactgagactccggtgtgtgcggcagatgttttcttttctgcttttttcggccagtacggctcctttgcaaacgggtagaccggcacgctgatccgtttcggatgcttgtctttgtaaagcttgtgccaattaatggcgacacctttactccacatttcacagagcttcgttccttttcctttcgcaagccatttctcaatgagttcagcgctgtcatcatcatcagaaagccaggcaatatcttttgcctgctgtttttctcctctaaagcagcctgttacagccggcttatcattgataaaatcggcaagctgccgcttgagctccgcagtgccgcttgtgataaaggccgcgcgctcttccatcgcttcccttccgacttggaacgtgtaggcaagatcagcgaggccggcgtccgtttttctttccagaaaagccagcagctgttttgcgtactccttcagacgatctttttttctggcagacaacggaatgatgaacggaccggcagcgtctgctgcttcggatgcatccggatattgttcaaaaatcgcgtgtgtgtttgttccgccaagaccgaaagagcttaaagccatgcggtgcgctctgttctcacgggttaactctttcttttctcccgctacgtaaaacggagagtcttctaaatgaagattcgggttcggctctttgtaattgatgctcggcgcgatttcctgatgatataagctcatgacaaccttgatgcagcccgccattccggccgctgtatccaaatgcccgagatttgttttgactgaaccgatgccgcagtattgttttttatctgtatatcggccgtacaccgattgaagtgcggacagttcgatcgggtcgccgagttttgttcctgtgccgtgagcttcgacgtacgcgatcgtttcaggatggatgccggtctgatcaatgaccttctgaatgacctcagcctgtcctttgacgctcggcgcataaaatccgaccttatccgctccgtcgttattgacgccgattccgcgcagcagcgcataaatatggtcgccgtccttaacggcatccgacgcttttttcaagagcacggcgccggctccttcaccgccgatcattccatcagcagccgcgtcaaacgctttaatatgcccgtcgcttgaaaaattcagccccggctgatgaacatatccggcacttgattccgtatgaagggtcgcaccgccgacaagggcatacttggcttcgccggaatgcaggctttgaaaagccgaatgcaggccgattaacgaagatgagcagttggcatggacaaaatagctcggccctttcaacccgagtttatgagaaatcatcgtcggaatcgtgccgctttgggcaagcacccatgatacgtagccatccggcgtttccagctgtgctgtcgtctcctccggcagcaggctgcggtaagagttcgtgcttgcagacatatacacgcttgtttccggaatttcttttgagatatatcccgcatcctcgattgccttccatgaatggagcaaaagcattctcagctgagggtccatatattccgcatctttcggtgaaaagccgaagaaaccgggatcaaacatttctttcccctctaaaactgatttagccggaacgaagccgggatgatcagccagttcttcagaaacaccggatcggcggagctcctcttttgaaaagaagttgatgctttctttgccttctttgatgttattccaaaattcataatgatcttttgctcccggaaactcacaggatataccgataaccgcgacactgtcctcataataatcgggaatttctcccgctgggtgttcccggtcttctgtattcactttcttttgcggcacaggagccaaaacggtttctttcagtttttgttctgtgatgtaccggctgatgtcttttaccgtcgcgtattcaaacagctccgttacactgaattcacaatccagttcctgcgtcatccggtcagtgacagtcacggcaagaagcgaatctccccccgcatcaaaaaagcggtcatcaagctctatatctttgcttttcaatacatcctgccaaatcgccagcaccgcctgctggatatgagatgatgaaaatgtttgtgtgtccggctgcttttccgtcagatcgcgggcagcaagaagcttgcggtcaacttttccgttcggtgtgagcggcagctcttcaagacggataaacgaagctggcgtcatataggccggcagcgcttgtttcaaatgattgcgcaattcctttgcagacggaagcggctctccgtttttcaggatataaaatgcgcaaagtttttcatttccggagtgattgttcacaaccactacgctttcctgtacggccggataggcattcagccggctctcaatatctccgggttcaatccggtagccgcggattttgacttgggtgtccatccgtcccatgtattcaatgcggccgccgggaagaaaacgcgccatatcgcctgttttataaagctttgatcccaattcgagccggtggctgacgaaaacgttatctgtcagctcaggcttgttgaaataccctcttgccaatccgtctcccgcaatacaaagttctcccggcatcccttctaaaacagggttgagagcggaatccataatatacacacgggtattggcgatcgggcgcccgatcgtaagcgcgctctcattttccgttatacgctgcaccgcggaccagattgtcgtctctgtcggcccgaacatattccaagcctcacttttcgtatcgagaaactgctgcttcaattgttcgctaagcgcctctccgccgcaaaggattttcactttttcttcatttgaccatccggaatgaaagagcattttccacgtaaacggcgtcgcctgcatgatcgtcggtttgtactcttgaatcagctctttcagcttccgtgcgtcttttgtgaattctgtcttacagatgttgcactctgctcctttgattaaagggaggtaaagctccagtgccgcgatatcaaagcaatatgtcgtgacggcaagcagtttgtcttcggacgtaagccccggttcattcgccatcgagattaagaaattggtcagcgcccggtgcggaatcatcacgcccttcggtttgcccgtgctgcccgacgtgtaaatgacgtacgccagatcgtcaggtgtcactaaccgcttcagcgacgttctttccgcggctgtactttcaatacgagaccaatcgcggtcaatggcagttgtctgcacgcctccccagttcaaggagtgctctaaatcagctgtcgtcagacacattgaaatcctgctgtcggcgatcatatattccaatctgtcagcgggataagaaggatcaagcggcacatacgctcccccggcttttaaaatgccgagaaggccgacagccatatgcaatgaacggtctgtataaatgccgatgagatcatcagggcctgcaccgtgcgcctgcaaatagagcgccagcttcgtgcttttttcatcaagctcacggtacgtcagcttttgctgttcatacacgaccgcacaagcgtccggcgtttctgccgcctgacgttcgaataattcatggaagcaggcatccggatattcacggcttgtctcattccaagtcttaagaatcatgtgctcctctctttttgtcatgagagaaacgttctcaagcggcatatccggattcgccgtcaaagcttcagcggcctgtacaaattggctgaaaagtctggccgcccctgcttcgtcgaataattcggtgctgtatttaatcgtaagatccatgcctgatgcttcttcccacatttcaaatacaagatcatattccccctcctgatgaatgtcttttacaaactcacaggagaattccttgtattcatccagcatcgattgatagcttgaatactgcagaaagttctgatagaaaaaggcattgctgaaaacaggcgaaccgttctgcaggggtttcgcatgcacatcacgcaccattttcggaaacggataaaaggagtgatccagtccgtccagaacggcatcctgcaccttttgaacaaagtcagcaaatgtttcttttcgtccggctctgctccgtataggaagcatgttgaggaaatggccgaccactccgtcaaagcgttcttcaggtctgaccatcgcaggcatgcctgtcacaatatcttccttatctgtatatttgcttaaaagcaccatatagcagctcagcataacggtagacaaatgaatcgaacgggatgcggcaaacgccgttagattattcagcagccgttcgggaagacggcgtgtcagcgtatcttctgtaaactccggaacgctgctgcccgtgcgcatcggcggaagctgaaggtcaggcagatcgcccccgagctgtttcatccagtaagcgcgggcagctttgctttcttcacccgctaaataccgcttttcccaagccgcgaaatcggaatgaatgccgggagcggcggccgcaaactcttcttttccctccagcagcgcctgataatgatccagcagactgtgaataaatgtaatggatgaaaaaccgtcaaacacgatgtggtgaatgaccgtcaaaagataatgttccgaggcggattttgaaagcagccgcacgcgcagcaaaggcccgccttctttgacaaacggctctttaacttttttccgtatcagagcgggtatttgtgattcattgacgtcagaaatatcttcttccgagaatacaaaaggatctgccgcttctatgaaataaaacccgccgtctgtttcattcacggcgcttttgagcatcggatgctgctttaatacgagctgaaacgcctgtttcagtttctctttgtcgattccggttgtgaatcggaaacagagcgggacatggtatgcagtcgtttcaggcgacattttctgcaatgtccacagccctttttggacttctgaaagcgctggcgccgtttgccgtctctcccgttctgccggcggttcggctttttgggaatgatgctccgctgacatgtttgccgctttttcagcagtataagccgctaaagcgccaatcgtcgggtttttgtgcagctctcttgccgtcagccggatgtgatacgttttttcaattgatctggcgagtttcatcatcttgatggagttaacgccaaggctttgaaacggtgtatttggatcaacaagctcatccgcgatggaaagttcctctttcagaaaacggataaaatcccgttcaatttctttctctgcagaagccggggctgaattgccgccttcttgtctgttattatgtaatgaatcaaattgcccttgttcgaatgaatgtttcagctgagtgcgctggattttcccgattgccgtcttaggaatgtcttcttttgcgaccggaagcagataatcaggggtaacgccgattctctgtgtcacgtgctggtgaatgtgatgaataagcttcgtcatgcggttctcatccaatggaacagacgtcacaaagaaaatcgccagctcatctgtcgtgctttgattcggccggacggcgcatgccgctgtatatgacgtttcaatttccggcaattcctcaacggctgattcaatggcgtggctgtaataattcacaccgttgataatgatggcatctttcgtgcgccccgttatcgtcaggcggccttcacgcagaaatccgagatctcccgtttcaaaccagccgtcttctgtaaagacactctcgtttaagtccgggcgctcataatatccgctcgttacagtcagaccggacacttgaaagcggccgatttctccttcttccaccacttgattgcggtcatccgtaattctcatattaaaccccgggatcggcagaccgatctcgacgaaacgatcgtcgtcactcgtgttttccagtgtaaactcatctgagaaaattacgcccgaagacgtttcggacattccccatgcgggacggatggcattagccggcagaccgtgcggctctaaaagctccataattctgcgtccgactttcgccaccgcggcctccccgccgttcagcatataacgcatggaagataagtcccatttccgtgtttgaatctcttctgcgaaatcggcaagcagcccaaaggcaaaattgggggcccacgtgaccgaagcgcggtaatgatcaatcaggtcgagccattttaaaggatccatcaaaatggattcgctcggtatgttgatttcctcacatccgagataaacatcacgcagatgaagcattccgatgccgccgacatggtcaaaaggcatccagttaaacgtgacatcctcacttgtatagccctgcatctgaatatttcctttgaccatgcagacgatgttttcatggctgagcatcacggctttcggcgtgcccgtgcttcccgaggtcaaaagcagcatcgccaaatcttccggacggggatgatgacagtccgtatccatttcatgcgcactgagatcttctgccgccaaagcgcaaaacccggaaagctcctgctcctccgcccattcagtcatctccggcagcacttcacggcttgtgatgacatacggctgattcaaaagcgtccaggcgtctttcagtttttgcgtcccgctgttcatttctgtataagccggagcggccgcaagcggaaccgggatcgctcctaaaaaaacacagccccaaaacgcaggaatcagctgggaattgtcactgagctgtaatatgacttcatcctgagccttcactcctgattggcggagccctttcacaatcgaaagagcgatctttttcaggccgctgtaagtctggtacactttggtgccgtcaggctgtatatatgtgatgcccttttgatctcccgctgccgcggcggttttgtgcaggacttcaggaatcgtcatcggctgatccgctgaaagccgcaatggttttccgtagctgacagatggcttgagtaacccgcttgccttcatatcacttttcatagagctgcctccatttcatctgtatgtaagatgtatgtcttatactccgtacatcgtcgtgattcgttttttcacttcatcatcatgaaacgtctcatcgtgcatgattaactccttctcaatgacagccggaagctgctcgcgaaacggcgtcaccaagtgccttttcaatgtaattaaagagtttctcggtttttccgcaagctcacgggccaattcctgcgcatagtctaatacttcctgccgcggaagcaccggaaaaggcactcctcttttctccaggtcaccgccgcggtagtggccgccgtttaacagcatttcatggccgaggcttgccccaagcttctccggaacgataaaggtagcccccattccgggagtgaaaccgtatttcataaagtttgcggtatacacgctttctttgcttaaaatgacaaaatcactgaaaagccccatgacaaacccgcctccgattccgtggccctgcatggctgaaataacggggatatcacattccagcgccaaagaatacatgcggtcttccgtaaacttcgtgatgccctgctgaatcctgagcagaccttcctgtgtgcctccggaagcaaagtaatggccgtatcctgttaaaatcacagctttatagactgacgatttttttatacgggtgaatgcttccatcaatccatccgtcagttctttggagaaagcgtttttatgggctttatcctgcattgtcacttggataatatccggttcaatttcgagcagttcaactgcggcgttcggcatgatatcctcctaactgttctccgtttcccaaggaagccgccccgtttctgcataacggaaaatggctgattggttatccggatctgaaaacatcgcttgattttcggctagagcaatggatttcgaacgatgaacaaggtcgtttaaggaatccatgtattttttatagcggatgactgcttttttcgacagcgggcgaagacgcagcaaatgctttctcagctctgttgctgagtccgggacgcatacgtcacaaagtccccattcaagcgcctggcgtgccggcacgggctttgtcatgatcgtcatataatgagccttttgaaatccgattctttgaattaaaaacggcagaacgcaggctggataaagtccgaataacagttcagataaactgaacgaagcactctcctctgcaatgacgatatcgcaggcggcggcaaaaccgacacctcccgcatttacttttccgcggacgcgggcgattgtgatgtacggcccggattttaatgccagccacaaacggtaaagcggctcctgcgattccgcatgctgcattccctgcctcattttccggtacatctcatcaaaatccgccccgaaacaaaatacctccggctgcccttcaagcactacggaggtcacggagtcttcacattcagtaagaacgtgcaggcattcctccactaaacgctcattaatcgtattgttggcttcaggccgatcaaaggtgatgaagcagacattttgctgaaaacggacgttgatcgtctcataggtcacgggatccacctgtatttccgatgaaattccgtgatttcttccaaatataaacgagggctcccggcatgatggtctaaaatgttcggaatcatattcatatccaatttgacattccgggttccgaacttcaccagaccgctgcctttaaacagttcttcatactcttccatggacagcctgtatctgttgttcagatgctcttctattttgaaagaatgctgccgcgtttgtccttcaggcgtcacaacgccgctgtaaaattctgaacagcatccggagccgtacgagaaacagccgatccgcttagaagtgtcgaaagccccttgatcaatcgtgcttgcaagagccagtaaagaggctgcccccataatgtttccgactctttggcagtagcggagccccggctctaccctggtttgaaaatcctgttcgatctcagcgtttttcgcttttgcaagcttacgcatcatcgtccggtgagctcctttgaccatgccgccaaacggtgtatggaaggcaagatagtgaaacgtctctttatagtcagcgcccggcacacggtttttgtactcgcgaaatgtctgttcgcagcaatcgagataagacatcaatgacaagtcggcgtcaccggcttcactgtccgggatcggacggcatgtatccatcacctcatagccgtaatagccgttggcgcccgcatccgcctgaaatacgattgggttttcaccgatcaataaggcgacggcacccgctccggcgctcggttcggcgtaagaccaatcctcgcttaacgcatcgccgccttcggcaattaaaaaccgggaaatatccgtcgcgacgacaagcgccttcgctccgggggatgtctgcgacaaaataaaattaagcgccatctgcaaacccgccgttcctgaataacaggcctgcttcagttcaaataaacggcagttccggttgaggcctaaataatcatgaatatatgtactgagtgattttccgaagtcgatgccggactccgagcaggtaatcagcagctcgattctgtctttttcagcctctgtcaatcggtcgataatcggctttgccgcattaacgccgaatgtgacggggtcttcgtacggaagcgccaccgctttttctttcatcagtaaattctcaaatctggcagggtctaagtttctgtactccgccagctgcatgacatcaaggtatgccgtcccgccaaacacatttatcgcttctattccggcagccgccatgaacttcgcctccaatatgaattttgagtttccgattttttcaccgttttatcagacagcctgtaccttttcataaagctttgccgccaattcgccgatgtttgacactcccgtcagctcaacacgcgggatctgcagtgataattcttcaagcatcatcgtgataatttcggcgcggtccactgagtccgcccccagatcaactaaccggtcttcctttgaaagctgttcgccttctaaatcaggcaaaacctcgtagattgtgttctgcagcaattcaaagattctttcttcactcattgtcagttcctccctgtttcatcttttatgaatattccatgttttcaatctatcatttcgtcttgtcaacacgtttgcagaaatgagcctaacttctgattcaaaagcgaggccgtctcttccataagacgaaggccgataccatcggcatggcggtttttccaggactccagctccgtacctttcacccattgattaaaggcgcctaatgccgggccgcaatgaatctggaagtctaccttggcatccgggtctcctttaatcgccgaagcagagctttgcctgaaataccatttgaatatgagcgccattttctgtttcggattccgttcggcttttgaaatgtcttcattcgaataatgagccttcactttgtcataaatactgcttacacttgccttaaaatacttctcttctatttgtctgagtgtcttttcatcaatttcttcaattgagcggtgacgctgatacagttcatgcagcttagaggcccgggtcggaaagaacagccctttctttaatacctgcaccttgctgcctgattcaaacatatcgccggccggcgcgtaggccgtgtcctgtacattcatctgctgcaggagatcctttacgaggccgctcgtcgctgcttcaacggtgcattggttaatggatccggtcacaataaaatcagcgccgagcataaatgcggccatagcagcctcaggcgttccgattccccctgcggctccgatgcggacggttttgccgtatcggtattttttcatcatgtcatctcgtaaacggatgatcgccggcatgagactgtaagcaactccgccgtcagtgtggccgcctgaatcagcctctacgcagatgtcatgcgcaacgggtatttctctcatcagacttgcttcttcagcggtaattttgttttcggctgcaagtttctgcagaatgtgatcaggcgccgggctgagaaatgcttccgctacttccggacgggacagctttgcgataatccgctgacgcgctattatttgtccgccggcaccgcgttttaaccccttagcgcgaaaccttactaaagcaggagtaaccgttaaaaatgctgatgcttccaagttctgaaccccatgcttcagtaaaagatcaatcattttttcttctgaatctgtatgcttcatgttatgtacaacatttatgccaaaggaaccgccgtcacgaagctcatgctgaattgacaaaatggcgtcctcaacgtgcgcgatgttcaaaccgcccgttccgaaaaagcccatcattcctttttcggccagtttgacgaccatttccttcgaagaaattccgcggtacatgccgccggccaagtaggcgtatttcaattgataatcgcgcttaaactcttcatttcctaaagactccgccgtaattgagctttttccagcttcagccgggactttgatttcatctgttatcggctccgcttcagccgtaattctttgaatcagccccgtcagcacttttccgggaccgatttcctcaaagatcatgttctttcttcccattaaaaaacggatgctgtctgtccagttcaccgatcccgttatttgtccggtgagtgtctttttcagctcggtctgctcataaggtcttgccgtcacatttgaaatgaccggaatggacagcggcttaaaatggaaagtttcaataaaccgtgaaaattcctccttcgcttccagcatgtatctggaatgaaaggcgccgctgacatttaagcggtgaaccatttttacgccgtttacggcttcaaaaacggatgcggctttttcaatatcttctttatatccggaaatgacaatttgctgcggagtgttcatgttggcgatatcaatcgtatgcaagtgatactcccttaaaacgtccgtcacctgctcatgagtcaggccgatcaccgctgccatgccgcctccttttgcgcggctcatcaggtcgcccctttttttgaccagctgtaggccttcttcaaaatcaaaagcgcccgaggcgtataacgcgttatattcgcctaaactgtgtccggcggtaaaatccggtttcaagccggtttcttctgtttttttcaaataactgagggcattgacgacatagagcgccggctgagtgaattgagtctgattgagacgttctccgtcccggcacagctcctgaatggaatatccgagaatgtgatccgcctttgcggttaattcaggatagcggccgaacaggtcctctcccatccctattttttgcgagccttggcctggaaaaacaaagctgatcatcttacagtctccttccgggcggtgataaaatgctgtcttctatttgctgcaaatgggtttgttctttatgaaacggcgtcataatggcacggatgcgttcagccgatcctgcgggaagaatctgtttggcaaatgcggccaacgttccggaaggcccggcatcgatatacaatcctttttggcggctgtctgcgaattgaagcgcttcgcggaattgaatcggctttcttacaatatcccagaaaaagtccgcttgtatatcggtctcagcctctccggtcgcactggagatgtacggtataaacggagtccggattaatttctgagctaaaaagcgcttgtacggctgttccgcctgatcaaccagcgctgagtgaaacccgtaagataccggcaatagctgatgaggaatctgcttttctctcagatcgtccatgatctttttgatatgttcccgctctcccgagatgacaaagtgagaatgatagtttacagatgccaattcactatgttcgccgagcagcggatcatcttgatataaagccggatcacccagtatcgcaagcatgctgccgttacggcaagtttccgtaatgattcgggcctgttccagcacgcaatctaaagcatcctcagcgctcagcacacccgacacagcggccgctgcatactctccaaggcttgctccgatcacataatcgggacgtatgcctctttgctccaaagcatatgcaagtgcgtactcagccataaaaatggcaggatggctgaaaagaaggcggtcaaatggatcagacagacgattgcctgtatgataaacctctttcaggacagagtaaccgaaacggctgactgcaaaatcgtccaagtcaagcattttctgccgaaaagcggcgttatgtgcaaacagctctttccccatttgatagtattgggaaccctgtccagaaaacatgaaaacaattggctggttcatttgttctcctttttgctctttatttttttaaaatattgatttgtaagtttttcttgatgttgtgtgcaggtgaagtggtcgtgatgttgtatggctggcactattatgtgagataagaattttgacttgcgttccgctacatggcgggtgaagcttcagtttcttttttgatgcggtgaataagtcctgtcagcacatggcccgggccgacttcttcaaattccatccgccctttgtccagcagatagcgcatgctgtcgttccatcgcactgaatggtcgatctgatcggccagaacggagtggattccgtcttgctcataaggcctggcatgcacattagaaatgacaggaattgatatagcagaaaaatgaaatgactgtaaaaatttttcgaactcttgttttgcttcgctcatatatctcgagtgaaaagcgccgctgacgtttaacggatgaaacatcgtaacgtcctttattccttcgaatacgcttttggctctttcaatgtcttctttgcgtccggatatgacaacttggtgaggagaattcatattggcaatatcaatcgtatgtaatccgtgcgtttgaagggcgtccgacacttgagctgcggttaaccccataacggcggccatttttccgtcagtggccatactcattaattcgcctcttttacggacaagctgcaggccggtaataaaatcaaaagcacctgctgcaaacagcgcattatattctcccaaactgtggccggccaaataatccggctttatgtcattttcttggatttttttcaaatagcttaacgcgtttacaacatataaagcaggctgggtgaactgcgtcttgtgaagattggaatacggattctcaagacaaagccgtttcatggaatatccgagtgtttcatcagcctgctccgttaagtctttaaattcatcaaacaatgagcttcccattccctgcttttgagaaccttgtccggggaatatgtatgtgatcattttctcagccatcctttctcggattcagttaagaagcatgttcaagttgatagtaacttcacaaaaataccatgtcaagttaatttatcctatgcggaatcctgaataatgcctatttttccctgacggaaggcggactcagggcttttggaatagacataagcagaatgtcccattcagcctgcccggcgcttttatccgcaaactaccgttactcagccattcatcaccaaaaagcgagcaatgactatcatttcaattcagaagttccgtggcctaaaagaaaaactagttagatagaaccaaattatacgctacttaaagtgaaacagccctttttgattttttctgttgcggaaattcacgaaatgttcttttttttcaatctgaaagtaaatattgtttttcaaaagactctccattttttgacccggcttctccccgaaggagtgccccggatacacacgcacatgcggcggaatagaggctttgatcctctgtatactgtgaaacatatcttcagctgagctgcccctgtcctcacatataccgcacccttctgtaaacacggtatcaccggtaaaaaggtgatcagatagcaaatagcacattcccccggccgtatgtcccggggtcaatatacttctgatgataaaccctccggccgcaaaggtttgtccgtcttcaagcgctattaagtttctgcaccggaattgatagaaatcgatttccgccgacgacatgtatatatcagaatgatagatttgctgaagcggctccgccaagtttacatggtcataatgcgaatgtgttaataaaatagctgataaatcaacatccaattcatgcagtttatcggttattttatcgatttcccaggacgggtccaccgctatcgcagatttttttgagcggtctgcgataatataacaatagttggaccacatctggtgataagttttgatttgatgcacttcatatgtatgatccattgtcaccattcccatttaaaagatccgggcagactgctgccgccgcccagccgactgtaaccactttaccagatggcaccacgtttttccatggattttccggtaaagtttaaaaaactttctgctcccgccaaaagcaccagtctgggccttttttacaaattgctatgctgatatataaggaaatcagaatattaattcagatgaattctttagggaattttattcagaaaatgaaggatgaatatgagtttcggataaaaagaaaacaaattgaacttttgttttgagaagcaattacagaagcggccggaggagataatcagtttttagaaatgacccgcaattaagattattatttcaatccttttcttcagataaactaaaccacacgggctctcgaaatatatcagaataccttagttcttacaccgaattcaacgttatgttgacattaacataattgaactgagaaaagtacagcttaatttacactctttttttttgcgagaaaaccgttcaaaaaccagtctagctgcaacaattcacgaaagcgtcgcgcatgaaaaaagacgtcagttgaagacgatttatatttgattattgacaaggagctcagatgtttttgttagggctaaataaagttatctttttactgtgtaaaaagtaaatattaagatttagacaaatagactatgtgatatgggtcggagtttactgttcaaggtgatttgtcctgagctataaaagcactgagagcagctcgggacgcaatacctactaaagttaaagctgctatgggtggaatcggcggttttgaaataattcttaatatcattgacaattttactggtgcagttgaagatgcgtgctatgcggatgctctaaaagtaactggtaaccaggcagcaactttgtgggttactaaaactcttatgcttttcctttaaatggggctattgttggtgtttaacaaatttatcctgtgttaagctttaaagtgattattttctaaagtgtttaagatcggaggtaactatggaagataaaagtaatgctgaaccgagcccgaaagctataagaattctaacttacatcattcctataattttaatagggcttatccttgtccttaagaatattaacaccgccgcagcggaaatttcattttatattgttgctgtcggtgtggttctcttagtggttttcagtttgatcaaaaatagaaaataccgcaggaagaactaaatgtaagggggctaatcactagtcccccttgactgacttgcggatagtataacccgccaaattccaattttatttaaattcttccccatctcttccctgtgactttgtaaaagcaggtacccgcatacagagtattcatcttgtacttcagggatccttcccaaataactggatgttaaacaaattatcttcatgatttacggtataccatgcaacaattatgccagaactcaaaagttatctctgaaaggctgggtcattcaaactagtaaggctgcttgtgggtaaataacagtttagtctcacataaacgttgttattacatcacacgcttaaacatcttctccatttcatacgtactgtggtggataatgatcggccggccgtgcgggcatgtgaacgggtctgtcgttcggcgcaggtcgtccaagagcgctttgatttcgtcgtttctcaaatggcggttcgctttgattgagcctttgcagctcatcataatggccgcttcctccctgagttttttaatatcgatctgtttggcgtcaagcacctgctgaatgatttcttcaatcagttcagcttcttccccttttggaaaccaggccggatggcagcggacgatgtagctgttcgtgccgaatgcttctaaaaatactccgacgctttcaagctcatgctgatgctggtcaatgatcagcgcttcatttgccgcataatgaaaggtgagcggcacgatcatatcctgcacttcaggctcgacctgcccgactttctcccggaaatattcgtatttaatccgttcttgcgccgcatgctggtcaatgatatacaagccgttttcgttttgggctaaaatatacgtcccgtgcatttggccgatcggatacatcaccggaactctttcttcccgtatttcttcagagtcagcctcctcttcaggctccggaatatcggaaacaggcgcttccgttaccggcatgccgagctccggcggcactccgtgacctgcttcatccggcagggactcttcttctatgaccggctccggctcttttacgaccgaactcagcttcatcggtgagtaagacggctccggcgttttttcaggaagtttccgctcaggcgcgctttcctcgaatgtcataaattgctgttcgtttttggccggtgccggcgctgtttttttcgggagctgggcgctcggaataagccgctgcttttgaaacacttcctttatcccgtcacggatcagctcatgcagctccgtctctttgctgaggcggacttcaagcttcgacggatggacattgacatcgaccaaaatcgggtccatcgtaatttcgataaacgtaatcggatggcggccgatcggcagaagtgtgtgatagccctcatgcaccgcttttacaagcgggaaattcttaatgtatctgccgttaatgacagatgacatatagtttctggatgcacgcgtgatttctggaagcgcgatgtagcccttgacttcaaaatcaagcgagctgacatggagcggtatcatttttttcgcaaccgccgtcccgtaaattgcggccagcacatggcgcacgtccccgttaccgtttgtctgcaacagatttttcccctgatggcggagacggatggatacttccggatgcgcaagagcaatccggttgacaacatccgtaatattgccgagctccgtatgcacggttttcatatatttcaatctggcgggcgtattgaaaaacaggttggtaacgataatctccgttccttttctgctggaggatttctgttcagaaatgatattcccgccctgaagaatgagatgggttcccgccccctcgccgatgctcgttttgatttccagatgagaaacagacgcgatacttggcaaagcttctccgcggaaaccgagtgttctcacccggaacaggtcgttttcatctttgattttgctggtcgcgtggcggcggaaagcccgcttgcaatcatcggtttccatcccttcgccgttatcgagcacccgaatcgacgaaagccccgcttcctctatgtcgatttcaatgactgtgctgtttgcgtcgatggcgttttccaccaattctttaacgactgaggcaggccgttcgaccacctcgccggccgctattttattcgaaagttcatctgacagctggatgacttttgccaagtccgtcacctctttctattttaattttttttgcagcttgtacatttcattcatcgcctcaagcggcgtcatatcgagaatattgattgacttaaaagcttcaagcacttgtttttctttattagaaacagccggtgccttctgttctttttcaccgtcagcaaaaaaggacagctgtgccggttcttctttgacggcgggctttttctcaggtgccgccggaagctccggtttatctcccgtctgctcaagctgtttcaaaatctcctgcgcgcggctgatcagatcgtccgggagctccgcaagctgggcgacatgaatgccgtaacttttatctgcggctccttctttgatttgatggagaaacacgaccgttccgttatattcctctgcgcgcacatgaacgtttttcagctgaggaagcttatcttcaagcaccgtcagctcatgataatgcgtgctgaatagtgttttagcgccgatatgatcatgaacatattcaataatcgcctgtgccagcgccattccgtcgtacgttgatgtcccgcggccgatttcatcaaacaggatcaggctgtcttttgtggcgttcacaatcgcgtttttcgcttccagcatttccaccataaaggtgctttgtccggaaatcaaatcatccgccgccccgattctcgtgaagatttgatcaaaaatcggcagaaccgcttcttttgcgggcacaaaacagccgatttgggccatgatcgatagaagtgcgatctgtctcatgtacgtgcttttacctgacatattcggacccgtaataaggagcatttcccgcgaatcgcccatcaggcagttgttcggcacgtattcttgactgtccatcaccttttcaacgacggggtgtctcccttcaatgacttttacttcattatcagaaaagacgggctttgtgtaatgcctgttttcactgatcgtagcaaagcattgcagcgcatccagctcactcatttgtttggcaagacgctgcagacgcggaataaattgtttcaccttttcacgcagaccggcaaaaagctcatattccagctcgcagatgttgttttccgcttctaaaataagcgcttctttttccttcaattccggcgtaatgtaccgttcggcgtttgtgagggtctgcttccgctcataccgcccgtcctcaagcagatgaaggtttgcttttgtgacttcaatataatagccgaacactttattgaaaccgacctttaatgaacggatgcccgtataagcgcgttcctgctgctccagtctggcaatccagtctttaccgtttttgctggcgtcacggtactcatcgagcttctgatgatagccgtctttaattaagttgccttcttttaacgataacggcgggttttcatgaagggcttcttctaacaggtcaagcaaatctccgcacggatcaatcaagccggcgcgttcttttgcttttttatggttaagagatcctacaagctctttaatgctcggcacttgttttaaagattctttcagctggattaaatctcttgcgttgacgtttccgaatgcgacccggcccgccagacgttctaaatcgtatacttccttcaggcgctcgcgcagatcttcgcgctcaaacagatgattgatcagcgtctcgaccatttcctggcgttcttcgatttgggatgccctgatcagcgggcggtcaatccattgtttgagaagccggccgcccatcgctgttttcgtctcgtctaaaagccaaagcaatgacccttttttgcttttcgaacggatcgtttccgtcagctcaagattccgttttgaatacaggtcaattttcatcgcttcttccaattcatatacttgaaccggctgcagatgatccaggctccgtttttgcgttttctgcaaatacgtatataaacgcataaacgtctctgtcagctcttcgcccggcaagtgctttgcgatttcaatgcgttctgttatttccccgtcttcgatagaaatcgttgcgccgcaccgttctttcagctgagcagccgtatgttcgttaaacttgcttgatacgacaatttcctttgcgccgactgagtaaatttctgacatgacatcttcaatccgctcaataaatacggccaggttttctccggtcgttaagtctgataaagcgagaccgtatccgttacgaaattcggaaacggaagcgataaagttgttttccgactcatggatgccttttccatccatcacggttcccggggtgatcagctggacgacttctctttttacaacgcctttagccgccttcggatcttccgtctgctcacagatcgccactttatagccctttttaatcagctgttcaatataagccgccgcggaatgatacggcacgccgcacatcggaattttatcagccgaacctccgtctctgcttgtcagtgtaatttcaagctcttgcgacgctttttttgcatcttcaaaaaacatttcataaaagtcaccaagccgaaaaaataaaaaggcatcttggtgctctgcctttatcttcaagtattgctgtatcataggcgtgtaactagccatcatttaatccctcactatgtatcttctcttatccgaatcccattataacataaacaaaagagtgatatctttatatataaaaaagagactcggggtgttaaactcccctagcctcaacttattcttcaggatctccgactaaaaattcagggttaatgtcctctaattcttcgtcaagatcgtcttcccaatcatcatcatcgtcttcttcccagtcaggattgacttcgacgacgactttcgtttcaccgaccacttctgctaaaaattccctctctgcctgaaccacgattttatttccgttaggagaaatggtgacttcaagacaattcggctgctgcagcactttggcaatgacttcgtgttcgtcatctaagtaatttgtatctctgtatctgagtttaatcacatcgacatactttactctctcggttacaacttccgtttttgtattatcggcgtaagagtaccagacgtttatatcataatacccttcaatttctacagtcttcccgatcttttcggcatcgtacttgtggttgataatccagccgcccagtatacttgacggtttttctccaggcgagatcgtgttggtgcattgggtgaattttcttcctttcgcaactaccgctttcgtaataatttccctgtattcagacattccggcaggcctccttgttcttcttcgtgttatcttatgctgggcatttgtctcatgtgcatttttataataaaaatataaaaatacaaagtttctgtttcattgtatgcagccctgcccagaaactttacttttaagtatgataaaactttccagtaaaaataggacaaaacgttgagacaatgaaaatttagtacatattacaattagttcttaaacggcaaaaaaaacacgggccgatgaaggccccgtgtttaaatagaacagctgttattcgaatgttttacttttgaaccggtttctcccgtcagcaggttgcctccggtagatgtaatgatttcgtttgtcacctgatttgagatcgtatgtgcgacaagctgaagaaggtcattgacctcaatctgggaatctctgaattcctggatgatcggaatcccttcaagctcttcctgcagggcgtcaattttactttccacttgtttcagcgcttcaagcttttcgtagtgcttcaggttaacggcttgcttttgcagggttttaatctgattaataatcgcagagactttttcattttcgttaatctgcgcctcggcgcgtttgaaaaaatcaacttcttctgtttcagaaatcattttcgcaaggttcctagcctgctgtacaatgtctttctttgagtaaagcgtcatcattatttcacctcgattgcttctcctgccatcacaccgtcaagcgaccatgttttcgcctgttcgattttgacgcgtacaatcttgccgatggcgtctttcggccctttgaagttgacgagcttgcttttttccgtatagccggcaagaatgtcagggttatttttgctttctccctcaactaatacttcgacagtcctgccttcatattccttcatttttttggctgaaatttctttcaccaaatcattaaggcgctgaagacgttctttcttgaccctcatcggaacattgtctttcatcttcgctgccggcgtgccttcacgaggagagtaaataaacgtatatgcgctgtcaaattccacttcgcgatataacgaaagcgtttcttcaaattgttcatccgtttcattcggaaaaccgacaataatatcggtcgtcagtgaagcgttcggcatcgccgctttaatttttccgacaagctccagatagcgttctctgtcatatttacgggccatcatttttaacatcgctgagcttcctgattgaaccggaagatggatatggtctaaaaggttgccgcctttggcgagcacttcgatcagatgatcatcaaagtcacgcggatgactcgtcgtgaatcggattctcggaatatcaattttacgcagttcgtccattaaatcaccgagaccgtacgtcatatcctcaaaatcttttccgtacgcattcacgttttgaccgagcagcgtgatttctttatagccttcgcttgcaagtcttctgacttcctggataatttcctcaggacggcggcttcgttcttttccgcgggtatacggtacgatgcagtatgtgcagaacttgtcgcagccgtacataatgttgacccagcctttaatttttccgttgcggactttcggaaggttctcaatgacatccccttctttcgaccacacttcaatgaccatctcttttgataaatatgcctctgataacagttccggcagacggtgaatgttgtgcgtgccgaaaatcatatcgacaaacgggtgcttcttaaggatgcggtttacgactgattcttcctgtgacatgcagccgcagacgccgagaatcaagtccgggttattttttttgagcgcctttaaatggccgagctctccgaacactttgttttcagcgttttcccggatggcgcaagtgtttaataaaataacgttcgcgtcatcaaccgaatttgtcgcttcataaccgagcgccataaaaatacccgccatgacttccgtatcatgctcgttcatttggcatccgtacgtgcggatataaaatttcctgccttcaccaaggcctttaaattcttcagagattttaaaatcgttatgatattgaacggattctttgccccgttttttcgcatcttttaaagaaggcggaatatatacggcttcaaaatacttgctgtaatccttttcggattttttgtccgccggattcacttgtccgctttcctgcttttgcttttcattcatgttcgaatgtctcctttcaaccgaaacttccaccctcaagtatactggttaaaagcgtttggcacaaccgccagcctattattgtacaccttattgagaataagaatcaataagaaataaaaaagagggaatcatttcccccttacacaagctgaagctcttttgcggctgaacggattacttccagggcccggtcaagctcctcttttgtatgctccgccgtaataatggtgcggattctcgcttttccttgggcgaccgtcggatacacgatgctttgtgcaaacacgccgcgggtcaataaaaggtctgataatgcctgggctttttcttcctcccctattaatatcggcacgatcggtgtttcgctttttgtgagggtcagccccatttgaaccagtttgtctttgaaatacgccgtgttctcccatagcttttccatatgctcaggctcttccagcaggacgtcaatggcttctatgcatgcggccgttactgcaggcggatgagaagtgctgaataagaaaggacgccctttatggcgcaggtaatcgatcagaacctgcgaccctgcggcgtaaccgccaagcactccgatggctttgcttaatgtgcccacctgtatgtggactcttccgtcaagcccgaagtgattaaccgtcccccttccgttttttccgagtacgccggaagcatgcgcatcgtcgaccatcacaaaggcatcgtacgcctctgcaagtttgacgatgtcaggcaaaggagcgatgttgccgtccattgagaatacgccgtcggtgacgatcaggcgcatgcggtaattcattgattttttcagcaccctttccaaatcgtccatatcaacatggcggtacacctttttatctgcttttgtcagcctgatcccgtcaataatggaagcatggttcagttcgtcagagatcacgatatcttcttttgtaagaatgcttgataagacgccctgattcgttgtgaaccccgattgaaaaacaagtgccgcttctgtttttttaaaggttgccaattttttctccagctcattgtgcattgtgaatgttccggcgattgtacggacggaccccgtacccgctccgaattcttccgcggcgcgtttggccgcttcgacaagtcttggatgcgacgtcaaaccgagataattgttcgatgaaagctgtatcacgttttcccctttgacttccaccgacggaccctgcttcgtttcaatttgtttcatttgctgccacgttttattttctttcattttatcaagctctgcttttagaaattcaaattctttcattatagaaccctccccttatggaatcaaaatgactttgccgcactgtccctttctcatcaggtcaaaccctttttcaaagtcttcaagcggaaactgatgcgtgatcaccggcgtcagatcaacaaggccggattcaagcaggtgcgatacctgccgccatgtttcaaacatttttctgcctgtgatgccttggacggtaagtcctttaaacaccacgtcatttgtcaggtcaaccgtcaccggacgttccggcagactcagcatgtggaaccttcccccgttggccgccatctttaatccttgtgttatggctgccgggtggcctgacatttcgcagacaaggtcgatcccttcaccgcctgttaaggtgtcgatcacctcaagcggatcttcctcatcaactgaaatggtgatcgcagctcccaatttcttcgcaagagccagcctgtaatcatttttatcaatggccgcaatacgggatgcaccggccgctttagccaccgccaccgccatcagcccgatcggtccgcagccgataattgcagcggaaccgcccgcaagccggctgctttccagcaccgtatgcaccgcgttgccaagcggctcttgaacagaggcgacggcggggtccatatcagcggggtttttccaaacatttcgggccggcactttgacatattcagcgaaggagccggctgtatctacgccgaggatctttgtatgggtgcacacatgatgtttttctgttaaacacgggacacaagtaccgcagacgaagtgggtttcagccgaaacgtagtcacctattttgacatttgtgacgtgcttgcccgtttccgctacgataccgctgaattcatgtccgaatacttgaggtgttttgattcgtttctgcgcccattgatcccaattataaatatgcacatctgtaccgcatatagatgcggcctgtactttaatgagaacttcattctcattaatggaaggtatgggaatttctttcagcgttgctccgaaagcgttttcatttttaacgatagctttcatctttcctcccaacatgtacactcctcctcgaaaaaacactgtaataactggattgtaacatgagataaaaaggaggtaaacaccagtgtccactcgaggaaaacaactgcttccgtccggaaaaatgggcgggattttttttgaatattatatgaataaagccatttatcatctcttcgtactatcaatataatattgtgagaaaatatgacagcaataaaaacaacctgctcgccttacgcaagcaggttgagaatgtacatatttttgtttttaacggggttcgacgattaacttaatcgccgttctttcttctccgtcaatctgtatatctgtaaaagccggaatacaaatcaaatctacgccgcttggcgcgacaaagcctctggcaatcgcaaccgctttaacagcctggtttaaggcacccgccccaattgcttgaatttcggcggctccgcgttctctcaatacgccggcaagcgcgcctgctactgaatttggacttgattttgctgaaacttttaagatttccatttctgctcccccttagttttacaatggataagtgagtgttcattagaacaatcattattagatgttgctatccaaaaagccatccccacaatgcttttcaaaaatagcgggctaccttccatttctactatattcactaagaagttgctatattcctgcttttccttttaatatttttataaaataaacacatgatcacctattcaaagaacatatggtcatcattgattaatatccgttcgatatttacggcctttttcgtttgatcgtcgatgtcaatgagcactccgctcagcgtagttttaccttccgccaccgtaaaccggacgggaagattggttttaaaccgcttgatgaccgtttctctgtccataccgagaattccgtcgtacggacccgtcatgcctacatcagtaatatatgccgttcctttcggcaaaatgcggttatctgccgtttgcacgtgtgtatgggtgcctaccacggcagaggctcttccgtctgtataccagccgatcgcaattttttcgcttgtcgcttccgcgtgaaaatcaataaaaatgtacggtgtgcgctttttcgcttcttctattaattcatccgctttagcaaacggatcatcaagcggcggaagaaacgtccgcccctgtaaattaatgacggcaagctcttttccgttcgatttaatataagtaatgcctttgcccggcgtaccttccgggaaattcgccggccggacaagatgcggcacatcatcaataaagtcgaagatctctcttttatcccacgtatggtttcccattgtaatggcgtcggctcccgcttccatcaggctgtggtagatcttttccgtcagtccttttccgtgtgctgcattttctccgttaataattgtaaaatgcggtttatgtttcgctttcagtttcgggacatattcttttaccatgtcgcggcccggggaaccgacaacatctccgataaataaaattctcatacattccattccttccttttcagggactcaaaaaaataaagtgatgcgctaagcatcactttattttgcatactctacggctcgagtttctctgatcacggtcactttaatgtgtcccggataatcaagctcgtcctcaattcgtttacggatatcacgcgccaaacgatgggcttctaaatcattaatggagtccggcttcaccatgatgcgaacttcacggccggcctgaatcgcaaatgatttttcaacaccttcgtaagactcggagatttcttcaagcttttcaagtctgcggatatagttttcgagcgtttcacttctcgcgcccggtcttgcggctgacagtgcatcagcggcagcaaccagaacggcgataatggaagtcggctcttcgtctccgtggtgtgacgcaatactgttaatgacgactggatgctctttatatttggtcgcaagctccactccgatttccacgtggcttccttccacttcatggtcaattgcttttccgatgtcatgcagaagaccggcacgcttggcaagctttgcatcttctccaagctcggaagccattaaaccggctaaaaacgcaacttccatagaatgtttcagtacgttctgcccgtagcttgtacggaatttcaaccggccgaggatcttgatcagatccgggtgaagtccgtgaacgccgacttcaaacgtcgtctgctcacccatttcccggatatagtcatcaacctcacggcgggatttttcaaccatttcttcaatgcgcgccggatgaatacggccatcctgaacgagtttatcaagagcgattcttgccgtctcccgtctgatcggatcaaatccggaaagaatgactgcttcaggtgtgtcatcaataatcaggtcaatacctgtaagcgtttcaagcgtacgaatgttacgcccttcacggccgatgatacgtcctttcatctcatcattcggaagattgacgaccgataccgtcgtttcggcaacatgatctgctgcacagcgctgcaaagcaagcgacagaatgtttttcgcctttttatctgcctcttctttcgcacggttttcggtttcttttgtcatgatggcgatgtcatgtgaaagctcattttcaacccggtcaagaatgatttgtttcgcttcatcccgtgtcaggctcgaaatgcgttcgagttctgactgctgcatacgaatcatctcatccactttgctttccatctcttcaatatgttgttgtcgttcattcagagaatgatctttcttctccaacatcgcttcccgtttatcaattccttcatgtttacggtcaagattttcttctttttgaagtaaacggttttcttgtttttgaagctcatttcgtctttcacgaacttcctgttcagcatctattcgaagtgtatggatttcgtcctttgcttcaagcagagcttcttttttcagtgcttcagcatcacgctttgcatcttcaaggatttgctcggcagcaccgcgtgcgcccgcaatctttgcttcggcaatggttttacgaacatagtagccaacaactaaaccgagcagagtcagcaaaatggagatgagaaccgtcattggggtcatactttcacctcctcttgctatgaacttggtttttgcttaaataagtgccggcatgtacattgtctgattttctcaacatacagaaccttcacagggaatgagtctctcatgcccttgtcaagtttaaatggtttaacaatcatgttaaaaaaacaaatgttacaacttcattgtaattgtgtcggaaatacttgtcaagcttgccagcttaacgattcgccttcagctcggatcgccgcccatgtatatatcataccataccttcatccgcttttcgtgaatgacggctctgtcagtccgcctggttaagcaattggtaaattctattgtttacctgtcctaatttggcgttattctgaatgtttgacagtaatatgacatatttgcttgccgaatggctgaaactgtttaaaatgttgtaaccgggcataacaccgtgattggaatagctgcccggatcaatgtaaaaccccatcccgtaagcggcactgcttcctgctgtaaacatttttgtgaagctttcttttgaaaggagcgtgccgtttacgatcgctttatcaaatttataaagatcttcagcgctcatatacatgtcgcccgccccgtaaagctgcgataagtccaaaaggtgcggcgttacaagactgccgctctcatcgactttgtagccgacggcaggatatttggcttcagcaaatgttttgtaaaatccggcatgcttcattccggccggtttgaacacgtgttcttttatatattgttcataagactccccgctgacctgagatgcgatataagcaagcactgaatagttggaatccctgtaatcccaaaccccgggctgccttttaattccgcggtattctatatccttgattaaatcaattggagaaatcggtccccgaccctcaatatgcccgtttatgccggacgtatgattgagcaggtttttcaatgtgatgcgcgtgccgttaggaaaattcggcaagtatgtactgacggggtcactcgtctgcagcagccctttttcttcaagctgcaggacagccgtcgcgattaacgctttttgtgaagaaccgatataatatgatgtctccggattgtttttaattttttgttttcggtctgcatagccaaagccttttttcagcacaacttttccatcttttacgatcattgctgtgccgctgaacccgatctgttgcaagtaattgctgatctgtttattgtgatcgattgatttaggtgttttctctttttgcgtcttttcttttttctgttgagtctggtcttttgaagtatcagattgagcggcgggagcgtttttaacggattccttctcccgatgatgcgctgtgacggtccagatcataataaaaacagtgacaagcagcagaaaaagaaacagccctcccgttttcatcagcttcttctttctttttttatttattcttgtgcggcgggggctcgtcatcttttttcctcctcagatataatttcaactttcgccatgatgttagacgagtgaagggtgaaaaaagttgtaacattccagataaaattttccgaaacagccagtgtttttttgaaacatacaaaaaaaagagcggaaattgcttattccgctcttttgatcgtgtttttattcttctaattccatctcttcctgaacttcttccgctttgtccgttacaccgttattgtctaaaccgtaatattcacggatttgttcctgaatcatcagcatgatgtctttattttcttttaagaactgcttggcgttttcacggccctgaccgaggcgttcttcttcataagaataccacgaaccgcttttttgcacgatatccagttcagttccaaggtcgatgatttccccttctttggagattccttcaccgtacataatgtccacttcagccgtacggaacggaggagcgactttgttttttacgactttaattctcgttttattccccatcacgtcgttgccctgctttaattgctcggcacggcgcacttcaagacgcacggaagaatagaatttcagcgcgcggccgcccggtgtcgtctccggatttccgaacataacgccgactttttcacgaatctggttaataaagattgcgattgttttagatttattgatggcgccggaaagcttacggagcgcctgagacataagacgcgcctgtaaaccgacgtgtgaatcacccatgtcaccttcaatttcagcttttggaacaagcgccgcaacagagtcaacgactacgatatcaacagctccgcttcgcaccagcgcttcagcaatctcaagcgcctgctcccccgtatccggctgagaaagcagaagctcttcgatattgacaccgagcttttgcgcgtaaacaggatcaagagcatgctcagcatcaataaatgctgcctgtccgcctttttcctgaacctcagcgattgcgtgaagcgctacagtcgttttacctgaactttcaggtccgtatacttcaataatccgtccgcgcgggtatccgcctattccgagagcagtatcaagtgcaagggagccgcttggcaccgttgaaattcttgtatccgttttttctccgagcttcatgatggaacctttgccgaattgtttttctatttgcttaagagccatatctaaggctgcctgacgatcactcatttattttttcctcctttatcttgccactacatatactataccttgtttactggcatttgccaagaaaaaagcgaacgcatattcggattttttccgcgttcgcttttctgcaaaagagcataatttcccttatgaaacttaaaaatcagagaaaaaagctctttaaaactttatttttgatccagcatttttaaaatgagatggcagccgtatttagcggcgcgctttctgattccggttcttgagccggcaaagtgaaattcgtgcacctcttcttttccttccgctgaaatgccgataaagacgcggcccggcgcatgcccttcctgcgggtcgggacccgcgaccccggtaaagctgatgccgatatcgcttccggtcagctttctcacaccggatgcaagctctttcgcacactctttgctgaccgctccgctttctgcgagcgtctcagctttcacgccgagcacatgctgtttcacgctgtcggaatagcagacaacacctcctgcaaatagttgagacgcaccgcttaaatcagtcacccactctgaaaacaagccgcctgtaaagctttcggcagaagaaatcgtgattttgttttgtctgcatgcttttgaaagctccttcaccagggacgtatcatcatatccgtagaaaaattcaccgacacgttctaaaatggcggcttccgtttcttttaaaagccgttctgtttctttttcgtcagcatgtttcgccgttaaacgcagcgtgacctcgccgtcagcagcaagcggcgcaatcgtcggattcgtctgcgcgtcaatgatatcttctaaatcagcttcaagctgggattcaccgattccgaaaaaccgcagcacggttgaaacgattttctcattagaaccaagctttttaagaagcagcggtttcgcttcattttcaaacatcggacgcagctcgctcggcggcccgggaagcagcatataaagccttgagccgtgctctgcaagcattcccggcgccatgccgaaatgattcgccaaaacgtccgagccctcaatgacgagcgcctgtttgcggttattcggcgacatggtccgttttgttttcgcgaaatattcttcgatcgaccggaacgcttcgtcattcagaacgagcgggcgccccagtgtgtttgcaatggtttctttcgtcaaatcgtccttggtcggtccgaggccgcctgaaaaaataatcaggtctgagcgctcttcggcaatgcggatgacttgcttaagccgctccggattgtcaccgacagcggtatggtaaaacacgtttacaccgatttccgccagttctttactgataaactgcgcgttcgtattggcgatctggccgagcagaagctccgagccgaccgcaatgatttctgctttttttgctatttccatctttaagtccttcttccttagttagatgtttttaacgcatcccagttcttcgcaaaataatcccagccggaaatgactgtgaagagcacggccacccataaagcgatatcgccgaacgggaaagaaacgagctcaaacggaagattatgcagcaaaagcgcggcaacagcgatgatctgggcccatgttttaattttccccagcatattggcggctacaacttcccccgttcccgccagcacaagtcttaatcccgttacggcaaattcgcggctgatgatgatgatgaccatccacgccggcgcaaggtcaaattgcacaagcgtaattaatgccgcggacaccagcagtttgtcagccagcggatctaaaaatttcccgaagtttgtcacgaggttcagttttctggcgtagtagccatccacccagtcagtcgttgatgcgataatgaacaaaacagctcccgtaagatgcgcgaccggaatcgattcatcccctatatgaacgctgccccaatgaaaaggaacaagcatgataatcataaatacaggaattaaagcgattcttgccagtgtgattttattcggtaagttaaacataaagcccctccaataatatgtactcggacgtgaagaaaaagtcatcttaatcgttcagatgactttttccccttttattttttcatcttgattgtgatggtctgcgccatcatatcatgcggattgagttcataggacagaacctctccgttgattttaattttcaggttaggggcatagcccgtgcggatttcaatctgcttttgatccgtgacgtcttttttaaaggtttcgcctttttgcagcgttccttcttttaaagaaccgccgctgtcatcacggacgcggatccatgcgctgtcagaagcaatcagttcaagcttatacttatctgccccggagacgttgtatgaagaagccgagccttccgttccggccgctttgatctccgtcttttcactgcttttttctttctttttctgctctgacgcttttgtgtcttttttgctgtcagattgcgcttcgtcgtttgtattgccgtcgtttttcagcgcagaatccttaggaatctcatacttgctctcactttgggtgacggccttatctccgtctgtctgcccggatttgctcattccgaactgaataatcgcataaatgatcgcgatgacgataatgacaccgatgacgacaaggacggtcggaagccattccgccgcctttgaagcggacttaggaagctccctttgcatggcgagaccggagattttttccgacacatcgtcatggtacgtgttagggatgtcttttttatattcttcgaataactgatctgaatcaagcccgacagcttcagcgtactgcttgataaacgcccgcacataaaaattgccgggaatgacgtcataattgccttcttccagagcggttaagtatcttttctgaattttcgtcgccgcctggagttcatccaatgacatccctttttcctctctggcttctttaagccggattgctaattctgtcacaacaaacaccttccaatattaaaaatcaaagcttgaaaaaccggtctggtcaaacatttgcggttcttctgcatgttcatatgtaatgacttcgtcaggatcatttctgagttcgataatataatcgaaatcatcgagcgtatactccgaattttgaacaaaaatatcggggtgctccacgacctttgtcgccggaagccgcataatttcactgacgagctgaagatggcgctcagatccccgtcttgtcgaaacgatgccgtcgaggataaacacgttttccgtgctgtattcatcggcaaccagctggctccggatcgtttgttttagcagcgttgatgatacgaaaagccatcttttgctggcacaaacgcttgacgcaacgatggactccgtctttccgaccctcggcattccccggattccgatcagtttgtgcccttcttttttaaacagctcggccataaagtcaaccagaagaccgagctcgtccctttcaaaacggaaggtttttttgtcatcggcatcacgctgaatgtatcttccgtggcggactgcgagacggtcgcgaagcctcggttctctcaacttcgttactttaatggtctccattgtttttaaaattgattccaatcgtttaatttgatctatatgccggcatctgagcagcattccccttctggaaaggtcgacaccgttaattgtgacaatattaattgacagcatcccgagaagagatgaaatatccccgagcaggccggggcggttcacttgaatttcatattcaaaataccattcgagctttgccaaatgatataccccctccattgtggcaaatttttaccttcctttatcataaaacatttttctctaattagaaagaagaatgttgctctatagaggaaaacataaaaaaagagaggagaaatcccccctcttaatgagtgctgttattttcaacaagcttcaccatcatatttgcgatggcgcgctgttcatcttcagaagcaacgctccaaagatcagcaagcactttttcctgatggtttttcgagtcgacttcgttcgcaaggtaaccgccgatttctgtcgcgaggtcagtgatcgtttcatcactcatccctttttcctgcgcatagttcaatctgtcgccaaggaaattcttccaattatcccagttttctaatactgacatgttgggttcctccatttcatctgttgttacaaaattattttgtccgtgcagatgcaaactatacacacatttttttcagcagtgccagccgccgtttacggataatatatgccccgtaatataggaagccttgtccgataataaaaaggccgccgcttcggcgatttcctccggcttcgccagccggcccgcgggaatttcctctgccaacgcttctttttcatcagacgtgaactgatcaagcatatttgtatcaacggcacccggcgagaccgcattcacgcggacgccgctcggagcgagctctttggcaagcgctttgacgaacgaatgctgcgctcctttgaccatgctgtataatacctcgcacgatgcacctgtttctccccagacggaaccgatcgcgacaatgcccccgctttttttccggatcatgccgggcaccagattacgcgccaaaagaaacggactcgtcacatgcagctgcaccatctcccgcgccgtgtcatccgtaacgtccgtaatcaggccgaaatgacttttgccgctgtttaatatcagagcgtccacaggctgcttaacggaacggctgagtgtctccgcgccatccggtgaggacagatcagcctggatagcggaggcttttacgccgaatgatgcgctcagcctttccgcaagcctgtgtgcggcttccttattagaatgataatgcaaaaggacgtcatatccgttttttgcgaggacttcacttatactttgtccgattccgccgcttgctccggttacgagcgctgtctgtttcatcaatcaatactccttctttccccagaaaaacatccctcagggcgtgagggatgttttgttatgattttggcacgactttgcagactgtcagcctgtcttctgatatttcttctttaatgacccgctttacgtcttccagggtgatctgctccagtacggttacgacatcaaacagactcatatctaaaaaggcgtagcgtgtgaattggttggcgatgtattcaggcgaattgagcgcttttaaaaatgacccgatcttcttttttctcgcaaggtcaagtttttccgcagttacggctgattctgcatcaagcagcatctgttttaattcgtcagcgagcttatccggctctggtgtatctcctccgacagaggcaaagccgaatccgtattcagccgtgtaatcaaagctgaaggtttcatcaatgtagcctttatcgtacaagttgccgtaatgcggtgagctttttccgaagagacattcaagcatgaggttcatgctgagctcgtgcttcaacagctcccgccccgttttataagggtctttcgcctttaaaccgacaagacattttgagccttgcacgttcatttttaattcctgctcccggcggaaaaccgcttcctgctcctgaacctctttacgtttgatttcaggctggtctgtaaacggctttttctcctggtttttccgcacctggctgatgatcgcttcaggatctgcggggccgacgataaagagcagcatattgctcggatgataaaacgtttcgtagcactcatacagcagatctttcgtaatatgagagatgctctccaccgttccggcaatgtcaatttttacggggtggtctttatacatattttcgataaggccgaaaaacagccgccaatccggattatcatcatacatattgatttcctggccgatgatgcctttttctttttcaactgatttttccgtgaaatacgggtcctgaacaaaatcaacgagtgtttccaggtttttctctacattagaagtgctggagaacagataagcggttcgtgtaaatgatgtaaaggcatttgccgacgccccctgcttactgaagtcctgaaacacgtcgccgtccgctttttcaaacagtttatgttccagaaaatgcgcgattccgtcaggcacgtgtaccatttcttccttatttaaaggaacgaattgattgtcaatggaaccgtactttgtcgtaaacacggcgtatgttttattaaaaccctgtttcggcagcacatagacatcaaggccgtttgccattttttcatgatacagcgtttcctgaagctgttcgaaatttatcggtttagtcaagatgctccccccgtcccttttaagaaataagtcgtatccagcttaatgttctttccgacattgataatgtcctcttttgtcactttctcgatattgtcgaggaaagtttcgatcggtatttccacttgggctgaagcctgctgatacagaaattccgctaagccgtatgccgtatcaatcgtttctaacacttggtttttaataacggctttcgtttgggcgatatcgtcctctgaaaagtcaccgttttgcatagcctgaaattgttcttcgataatggtgacggcctgcttataatttttcacctcaatgcccgacatgaccatcaaaagccctttgaagctttccacccttgaggctgcataataggcgaggcttgctttttcacggacatttataaacagctttgaatgagagaaacccccgaacagcccgttaaacacctgcaatgccggataatccggatctgtatatgtcgtattggtccggaatccgatattcagcttgccctgcttgacgtcctcttcatcaatgacttccttcggatcgggctgttcattcgtcttgcttctttcaaaaggctgcagctcccgttcttccgttttaaaatacgtatcaacggccgttttcacctgatctgaatcaacatcgccgatgacgtacaggtccagctgatcttcgcgtatggctttttgataggcttcatacaactcttgcggtgtaatgtgttcgacatcatcgaactcgccgttgacgtgaagggcatacggttcgcttttgcacatttcctgaacgagacgcagattagaatatctcatcttatcatcatatacggcttgaatccgctgtttcagcgtccgtttttcctgcgtgacataaaggggcaggaaggcgccgttttccaaagcgggcgaaaagacaagctctgataaaagctgaaggcctttttccaataacggtgtgcggtccttcagatacttttcgttaggaatctcaagtctgaacgtaatgacatgacgttctcccttttttgtcagatcagctgaaacggatgtgccgtacagctcatcaaaataagaacgcagatcagcggttttcgggcggctttctgttccgcgcagaagcacatgcggaaacagcgccctttttgttacgagctctttcgttaaaggagccagcattttaaacgtcagcgaaacggttttaaatttctcagtctttacgatgtgggcggtgatcccgccgtgctttgacttcatttcatttacgtaagtcatgtgaaacctccttcgttcattctttaatagtatgtattatggccaaatttcaggattcgcaaaaaagagtgcgcagatgtaattatatcaactggaggatttataaggaaacaaaaaacctctgcccgaaaacaggcagaggcattgaacgttattttttcaaattgaaaggccaccagttggctcttccgaatattttcaccatgaccggcacaaaaaacggaaggacgacaattgcgtacatgagaaggcctgttaataccacggttgcaatctgtaataaggaaagaacgcctgacggcagcatggccgcaaaggttcccgctaaaataatcgccgcagaaatgatgacggaacccatatttttcatactgctgatcattgcgggttccgttccttcttttttcagctcattaaagcggtccattaaaaagatggaataatccacaccaagagccatcaaaatgacaaagccgaagaacggcacggcccagtttacgcccggatacccgaagaagtgtgtaaagatgtattccgtcacgccgatggatgcgaaatacgtcagtacgagcgacgccactaaataaacaggcataataagagagcgcagcattatgatgagaatcagaaaaattcccgccagcataaacattgccgtccgtttgaagtctgaatccgatacttctttcagatcggcattcatgctggagactcccgaaacgccgaaagaggcattcttcagatccgtgttcggaatggctctttttacgctcgctttgatcgcttgaatatcttgaatggccgtatttgagtaaggattgttatcaagaacgacggtcaattctgtcgtttttctgtcatctgacatgtacgtattaaacacgcttgtgaaatcactgtttgtcaacgcgtctttcggcacaaaccagcctgtcatttctttatctgaggccttgtgaagctcacccaggtaatcattcgcccccatcatgccgcttgatactttcttaagcccttttacactatcgttaaggcctgaagaaagatcgctgagccgggaagaaaaatcaccgagaccgctcttcatttttttctggccctccgcgagctgtcctgccgccgattcaaggcgcggcatttgtcctgcaagagccccctgtccgtctgacacttgctgcagaccgttttcaatactggtcagaccggtgatcattgcgttaatttgagtgtcgatctttttttgagcggctgccagccgggcaaattgtttttccgcttgctgcagatgatccttttgactgtcgacctgtttagaaaacgcttctgcatccgcgtttgccttggaaacggctgactgtacacccgtaaaggccgatttgatttctttgtaagagggatcggttttgactgacggtattgacgcttccaattttgcaaacggcagccgggcaagctgcttgttcaaatcggcaagctgtctgctggtttcatctttcatcggcaggacggtttttaccaattttaaagcgttttgcgtttctgaagcgagaccgctgttttgtttgagctgtgaagtcagcatttgtttttgctcttcaatctgctttctcatctgggcgacgccggctttattctcattcacgcctgcctgcagtttattcaggttttcgcctatatcagaaagcccggatttcagagacaatgttccgttaataagctgattgacgcttttccccgactcttcgatctgcggctgtgaatcagctaacgactttgcggcatgccctaatccgtccgtgattttttcaagtcctgtattgcctttatcaagcccttcttgaagctgctttgcctgatttgtgacaaataattgattcaatccgtttccggcagggcgcgtggcgcttctgaccgtttttacaccctctgttttttcaagttctctgctgattttttcgatatcaatcaggtgtttttcggtatttagaggctcatcatttttgatgacgactgtggccggaagaagctcccccgggccgaatgcgtctgaaatcgtattaaacgcgcggacggattcatatttatccccgatttcgtcaaggctgttgtaagatagcgatcctttgtaaagaaggatcggcgggacggtgaataccgcaacgattgcaagactgatgagcggccttttaaatgaaaaccgccctgccgtttcccatgctttactttgaggatgggaaatatcacccttaacgggccaaaacagtctttttcctaaaacagccataaaaaacggcacgatcgtcatgagcgcaagcagcagcaccgcgacaccgactgcaacggcggctgccgactgatacagcttaaatgtcgcaaacccgatgcaggcaaatccgatcagcaccgcaccgccgctgtacaaaaccgtctttccggccgttttgtaggtgacgacgatcgcctctcttatatcagcgccatgcgacagttcttctttaaatctgctgagaagcagaatgcagtagtctgtgccgattccgaacataatcgcaaccatgaaaatctgcgtaaaagttgagagcggaaaattcagctggtcgactaaaaatgcgacaatcgactggctgactaaataagatatcaatacagataaaagcggcacaaacggagcgaccactgaccggaatacaaggatcagcacgatcaggataaaagcgaccgttatatattcagtctttttcaatccgtcctgtgagctttttaacacatcttcatcgatcagcgactggcctgtaatgccgtatgatacgccgtacggtttcagctctttatcaattttatttttgatttcgaggatatcgtttttggatgtatcaagctgcagctgaacgagcatcgtttgtctgtcttttgacagcagctgttttttgatgtcgtcatttttctccccgaagtatgaagtcaccgttttaatctgaagcgcttttttctgttcagacaaagtgctgacggcttcttccagacgatcttttttgtctgtcattaagcctttttcgtgaaatacgatgacggcagaagaagacggtgcatctgaatcagacatttcatcaagcaattcatgggcataagaagaggaatatccgtccggtacggaaatctgccctttctcccgtgtcaattcagccatatcaggcgctgtaagcataaatatcaccgttgcggcgatccataccgcggcgatgatccagcgggctcggataatgtttttcattatgtctgctgatcctcctctgtcatcatcaatcgatataatttttcatatgtattaacgaacatctccgcctcgtcttcatcaaaatacataatatatgaacggacgagttcctcaatccgccgctccacacggtgaaatacttccgtccccttttccgtgacatttaaaagtatgctccggcggtcgctttggctgcgttctctattgatgtagcctttttcatacaggcggttcgtcatcgatgtaatggcgcttttgttgacgtggcacaccgcggccagttcaattgatttgcaatccggattgagcataatatagcggagtatgtaatattgatccaatgtcagctctttgttcactttttcagcgataatgctgtcaattttttttaagacgtgcaggtatacatcggaataacgctgaatcagctgctttactttttcttcatgcatcttttccccctccttccaatagttaaaatgtttaactattaaaaaggataacgacttgacgatatcatgtcaatcttcaaaataaaataaaaaaagacagtgcagattacaccgtctttaatgattcctttttttcttttgcttgtgatgagatatttaacagcgctaaaaatacagacacaatgccgcaaaaagcggataaaataaaaatcagccagcctgcatttgacatcagggcagcaaagatcggcggtcccgcagctactccgataaaccgcatgctgttataaaatgaggtgatggttcccgattcctcgttgtctacgccttctgtgatgacagcgtctaatgccggtaatgctattccgataccgataccgctgacacacaaaaagataaataataaataaaaactgtgattccaccataggccgataaacgacagtgtcacggcactcattccgaaaacgatgcagaacttcattttgccttggtctttcccgatttttctgcctgatatatatgaactgacggatagaaataaaagcgggattgccaaaagcgctcctttagccacaccgtcaattccgtatttcttctccagtgagtctgataaataaaaaagaaccccgaacagcaaaaacataatcacgcagccgatgataaataccgtaaagagccagcgtccgtcacgcttaaatatgcggccgacattttttacaaattcggaaatagaaggggcttctttttgtttctccggctttgccaccaaaaacaatacgagaaaaaaactgataagcgaaaaaaacggaatgaaccaaaacggcataaaccaaaaccatgcagccaagagcgacccgagaatcgggcttaatactttcccggccgtgtttgacgtctcaatgtcgccgagccccgcggtaatccgctcatcatcccctttgaataaatcaccgataaacggcatcactacaggagccgcccctgccgaaccgattccctgcagcacccgccccgccaagataatgggataaggatgcttgaacgcggtggaagctatcgcggcaagcgctccgcccgcaccggctatgagaagacaaggcagaagaaccttttttcttccgaatttatcggacaaatatccggcaatcggaatacaaataatcgccacaatcgaatagaccgttataattaacgatacttgaaaagacgatatggacagcttcttttcaatcatcggaagcacaggaatcagcatggaattcccgagtgtcatcacgagcggtacagaagccagagcaatgatattttttgttccatttttcttcttactcaacttattcacccattcactatacttggttgtttcctgttttattgtgccttgcggaaaacaaagtatgtattgaagcggcaaataaaaaaacagacacatgacgcgtctgtcttaaaaacgttttcttacaacatgaaaactgaacttatcagcccggaaataatttaatgaatacagcacaggttcatcattctgattatagtgggtttgcttcagcaataaaagcgccgtctccggctcgcactccaaaaccggtgaaatcgtatcgtgatatccgatcggttcgatatcggcaacggcatagctgatcacagacccggagtttttttccaaaagatcaaaaatagattcctgttcatgacagaaagaattcggcagaatgtgcatcggaatcgtatctaaacagtaaacgaccggagtgccgcttgccgttctcacgcgttccaaataaaaaagctcctgctcaggctcaagccggaatctagcgatatcttcctcagacggcgtgatgacctgagacgacaaaaaaatcgtacccggcaccatgttcgcctgctgaatcattttcgtcacgctgttgagctgttcaatacctgaaagaaacagcggttttgtatggacgaaagtgcccacaccgtgccttctgataatcacatgctcctcttcaaggatacgcaaagcttcacgcagagttgcccggctgacacccatagattttgaaagctcaaattcagaaggaagcttttccttttcggtgtaaattccgttttgtatatcctctttgattcgctcaatcacttttaggtacaagtgacgattgtcagcttttgtagacatgtttcccctccgtaaaccactttcataaattattgaacaattgggacaactatatcatgttttaataaaaaaataaataggaatgattttggtgatatcattttcagtgaaaactctctcctttttaagaagagagctcatcatattgttccttagataatagtacttccctcggtttgcttccttcatacggcccgacgacgccccgttcctccattgcgtcaatcagacgggcagctctcgtatatccgattctgaaccgcctttgaagcatggagactgatgccgtctgcatgccgataatcaaatcgaccgcttcgtcatagagatcatccgttacttcactgtgtgtttccgacacttcttccggaatcatctcttcttgatactgcgctttttgctgcgtaatcacatgatcgacgacatgctcaacctcttcatccgataaaaatgctccctggacccggacaggcttattcgcgcctacaggcagaaacagcatgtctccgcgccccagaagcttttcagcgccgcccatgtctaaaatggtccgtgaatcggtctgagatgagacgctgaaggcaattcttgacggaatgttggctttaataacaccggtaatgacatcgactgaaggccgctgtgtcgcgataatcaaatgaattcccgccgcccgcgccatctgtgaaagtctcgtaattgaatcttccacgtcggaagaagcgaccatcatcagatcggcaagctcgtcaacaatgacgacgatgtacggcagctcaggctgcttgacttcttcttcggcatttgaccgcttaatatggtcgttatagccttctatatttctcgtacccgtatgggagaacagctcatagcggcgctccatctcattgacgacctttttcaaagcctgcgaggcctttttcggatctgtcacgaccggcgcaagcagatgaggaatgccgttatacacattcagctcaaccattttcgggtcaatcatcatcatcttcacttcatgcggtttggccctcatcagaatgctcgtaataataccgttgacacagacgctttttccgcttcccgttgcccccgctacgagcaggtggggcattttgttcagttcggcaagcacggcttccccggaaatatttcgtcccaagccgatcagaagcttcgcgtccggcttgtcattgagcttggattcaagcacttcttttaacgaaaccatcgcaacttcagcattgggcacctcgatgccgattgctgatttgcccggaatcggcgcttctatccggatatccttggcggcaagcgcgagcgcgaggtcatcgctcagattcacgattttactgactttgaccccgacgtccggatacacctcatattttgtgaccgccgggccgagatgaacttgggtcactttcgcctttaccccgaagctttgaaaggtccgttcgagttttcttgcattctcgtaaatgtttttcttatcggtctgctggccggtatgtttcgggtcagccaggatgtccaatgaaggcatttgataatctttattttcaagctctgtaaacgtcatcggcggagccgcagccgtttcgtcactgtcttgagcgccgccggaaggctcatcttttgccgtttgcgccgtctcctgcgttttttccggaatcagcggttcgacgcgttcttcctgacggtctgaaaagcttgaaataatcggctctgaatggatgatcggcgaaatgatttcctcatcctcttcttcgggctcaggcatttcttttttcttctgaacccgtttttgttttttgcccgatttggtttttgttttcggcgaagacatattcgttctgaccgttttcatatcctcaagaaatgcctgccattgaccgcggataaaccggccgacggggctcgtccactttttgagcgtttcctgcagtgaacgccccgttacaagaatcagccccattaagatcagcacgatcgccatgatctgtgaacccgttgatgcaaataaaaagtgggaagctgcaaacagcaccgcgccgatcatgccgccgcccaaatcaggggaagcagcctgctgtttcatgtcaatcataaacagctcccacgtgttgccgatgacacttgccgaccgaatcgacccgtgatgagacagatttttaaagagctgcacgtgagacagcagcaaaatactggcgataatacagtacaaccctgcctttctcctcgttaaaaggcttggactcttctttttccaaaacagcgaaattccgagaaggaagagcgcaattaagcataaaataaaccactctccggcaaaaaaacggaacaagtacacaaatgtctgtcccacaacgccgagctgcaaaacagcaataatcgagattgcaacacagagcagtccgcttagttcgtattttagattgagcttactctcttgtttctttttagatttccgttttttctttgccacactcatcaccttactgcgttaaaaaatgtaaaatcatacatcatgaagaaaagcagccttttgccggctgcatttttctgtaggattcccctattatagcatattttgcccccgagaaacggactgaatgccggttagattttcagcttgattttttgtcccggagcgatgtccggattcagaaaatccatcgggttcgtacttaaaatctgtacgacttcagcttcatttcccttcatctcaaccagcagcggcacgccggcgtaatctacctgttcatgcacgctttgctctatatcctgaccgtaaacgacttcttgtggcatgacggtataaaggatcattgaatcatccttccttcctcgccctttcgttcctcaatcagctgattcagcttttttatcgcctgtccgacgccgcccacggcatcaattaatccgtaatcagccgcatctttgccgactacgttcgttccgatgtccctggttaagtttccttttgaaaacatcagctctttgaatttttcttcggaaatatttgaatgatgggtcacaaagttgacgacccgctcctgcattttatccaggtattcaaacgtttgcggaacgccgataaccagacctgtaagccgaacggggtgaatggtcattgtcgctgtctccgcgataaaactatgatcacatgacacggcgatcggcacacctatggagtggcccccgccgagtacgattgagacggtcggttttgataaggatgcgagcatttccgcaatcgcaagccccgcttccacatcgcctccgacggtgtttaagatgatcagaagtccttcgattttcggattttgctcaatggcgacgatttgcggaatgacatgttcatatttggttgttttattttgcggcgggagctggacgtgcccctcaatttggccgatgatcgtcaggcagtgaatattggtatcttgggacatttgcggcagagatgtctctcccagctgctgaattttgctcataatgctgtctttcgcatctgatttttcgggctgctgttcttcggtgttttccatacgatgatccattttatctttcaccctttccgaatgtctctttgtattatgaacaaagatgatgatttccatccgggacatgaacaaaaacaaagccggagcatcatgcgctccggctttgtatacattatacttccataatgatcggaatgatcatcggcttgcgttttgttttttcataaaggaattgattcagcgcatcacgcattgcttgtttcagcgtggaccattctacggcagatgtttccgtcgcttcagtcacgatagagcggacgagctcagtagcttgtacaattaacccctctgattctctgacatacacgaaaccgcgcgtaatgatctcagggcctgaaacaaggttcttcttctgcttatcgagtgaaatcacgacgatgagaatgccgtcttgtgacaataagcggcggtctctcagcacgatgttgccgatgtcgccgactccgaggccgtcaatcagaacgtttccgtatgtgactttatccccgattttcacattctggccgcggaattcaacgacatcacctttttcaatcaagaaaatgtcgctgcgtttcatgccgatctcttctgcgattttggaatgcgctttttgcattctgaattcaccgttaaccggaattaaatatttcggtttcagcaaattaagcatgagtttcaattcttcctgcgaaccgtgaccggacacatgcactcgtttttgggcgaaaatgacttgagcgccggcgcgggcaagcaggttgacggttttggaatatatcaattcatgccccggaatcggtgttgatgcaatgacaacggtgtctccttcttcaatgttaagctgcttgtgcgcctgcttggccattcgcgtaagagcggccagcggctcaccatggcttccggctgtaacaattgccacgtcccgcttcggatattttttcacatcctgcacaggaataaacatttcatcttcggcttcaatatagccgagcttgcgtccaagctgaagcacgttttgcagattttttccggcgattgcaagtttgcggccgttctggacggcagcctgtatcacttgctgaatccggttgatattagacgcgaatacagcaatgatgacacggttttctgaattgttcatcgcatcggaaatttcaccgcttacatatgcttctgacggagtataccccgggcgctccgcattggcgctgtcagaaagcagggcgagcacgccgctgtttccgattttggcaatttcgccaatatcacatgattgatgataagcaggcgtctggtcaaatttgaagtctcccgtgcatacaatagagccaagtgatgttttgaagctgactcccactgaatccggaatactgtgaatcgttttaaagaacgatactttcgttgattcaaatgtaatgactgatttagagtgaacttcacgtaaatcagcttttcgattatgcccgtactgcttgagtttttctctcagtaatgcaagcgtaagcttcgttccgtataccggcaccgacagcttgttcaataaataaaagacgcccccgatgttttcatcgtgcccgtgtgtcagaaagatggccttcacgcggtcagcccgttctactaagtaggaaatatccggaatgacgacatcaataccgagcatttcattttcagggtgcatcagccccgcatccactacaaatatgtctgagtcaatttcaatgacatataggttcttcccaatttctccgacgccgccaagggcgataattctgacgttttctgtatttttctttttcaaaatctgtatcctcctagtctcatacccgtccatcatcacttgttcctattataactgatatcaattttagaaaacaagaagaagcggaaggtttagggaaaaccaatatgtatacaaaacggtcaaactcacgataaaaatgagaatgaccgcgtatttcaactgtataaattttttcttacagttcgctgatgacgctgctcaggctcagacgttcatcttcattcagcgggataagaggaagacgcacagatccgacatcaaggcctttcagctgcagcgccgttttgaccggagccggattaggcgctttaaagagctccttcatgatcggcagaagcttctgatgaatcagtgccgcggttgccgtctgcccgttcgtatagtttttaatcatctgctgcatgtcagaacccacaatatggctggccactgacacgactcctcttccgccgactgcaagaataggaagcgttaacccgtcatcacctgaatagacgtaaaaatcttccggcgtttcggcaatgattttcgtaatggcatcaagatcgccgctcgcttctttaatcgcagagatattcggaatctccgcaagtctgatggccgtttccggcgcaagcgaagcgaccgttctgcccggcacgttgtaaagcatcacaggaagagacgtttcttcagctatggctttaaaatgacggtacatcccctcttgggaaggcttattataatacggcgtgacaagcataacgcaatcgacgccggcttcttcagctttttttgtcagtttaatggaatctttcgtattgttgcttcccgtacccgcaataacaggcacgcgtccgttcacttctttgactgtaaattcaaagagtgcaattttttcttccgttgaaagtgtcggggattcgccggtcgtgcctgcgacgactaaagaatccgtgccgtttttcaacaaatagtcgattaatgtagacagtttttgaaagtctacattccctttactgtcaaagggggtaatcatcgctgtagatatatttccgacattcatttttttcacctcatcatgattcaatcacatttactttgaaagttcaaacacttcatgcagcgcatttacggccgttaccatatctttttcatgaacgagcacccagatcgtcgtatggctgtcggcagattgcagaatcggaatgcctttatcagaaagtgcggagacgatttttgacgtgacacccggaacacccattattccggcgccgaccgctgacactttcgcacagctttccgtcactgtcggctcatatcctaattcagccaaaatgctgcgcgcggcttccgttttactgccggctacggtatatacgatttcactcggcgtaatgttaaagaaatctacactgattccggcatttgccattgctttaaagacttcagtctgaacgttgtattgccccattttggcgggaaccttaaattgcgtcacgtctttcacatgggcgatccccgtaatcagccgttcgaatacatcgctgccgatgttagacgaatgatgggacgtcaccaaagtgcctttgtcttttgaataagtggagcgcacgcggatcggcacctttgcctgcatggcgatttccaccgcgcgcggatgaatgactttcgcgccttgataagcaaggttgcagatttccgtatatgtgacattcggaagcggcttagcattttccacgattctcggatcggctgtcataacaccttccacgtccgtaaaaatgtcgataaactcagcatcaaccgccgcgccgagcgccgccgctgatgtatcgcttccacctctgccgatcgtcgtcgtgtcgcctttttcagtcgctccctgaaagcctgcgacaacgacggcatcatggctggcgagtgcagcgaaaagccgctctgttttcatttctataattttggcgtcagtatgctgggcattggttaaaaagccggcctgagctcctgttaaagctgcggcttttatgccgttttccttcagcatgctggaaaaaacaacggacgaaatcgtttctccgcaagacagaagcatatcctgctctctcggagaaatgtcggactggctgccgtaaaggagcccgattaaagaatctgtcgcgtacgggtctccttttcttcccatcgccgatacaacaacgacaaccttataaccttcacttatggcatcttttatgtgtgctagcgcaagcttgcggcctttgtcatcttttacggatgttccgccgaatttttgaacaatgatcttcactattttcactccaaattagtctgacgtaacagaagagagcaggcagagccttactctcttctgttcgcctatagaaaatacgtttgttttatacgaggttcagtttttgcaggctttccgcgatttgaactgagttccaagcggcgccttttaacaggttatcagaaacaacccacaaatgaaaaccgtttgctctgtccaaatctttccgaattcttcctacaaatacatcgcgtttgccgacgcaatcagcaggcatcgggtaaagctgctccgccggatcatcctgaagcgtaacacccggagcttcttttaaaagctgtttaatatcttcaacggttgcgtcatcacggtcaagctcaatgtaaacagattctgaatgccctgtttcaatcggcagtcttacacatgtcgcagccacttccagcttcggcatatgcatgatttttttcgtttcattaatcattttcatttcctcaaacgtatagccgttgtcttggaatttatcaatttgcggaatggcgttaaatgcgatttgataatgctttttgtcgcctttaaccggcataatggacggttctgcgggttcattgtttaaaatcgcctttgtctggctgtacaattctttcgccgcttcattgccggctccggacacagcttggtaagtagatacaatgacttttttcaaaccgtacgctttgcggatcggttcaagcgcagccaccatctgaatcgttgaacagttagggttggcgataatgccgttatgtttgtgcagatcaccttcgttcacctcaggcaccacgagcggtgtattttcgtccatacggaatgcgctcgtattgtcaatcacgatggctccccgttttacagcctcaggcgccaagctttgtgatacgcttccgccggcgctgaataacgcgatatgaacgccttcgaagctttcaggaacagcttcctgcactgtatattcttcgcctttaaacgttactttcgtaccagcagaacgctttgaggatagtagtgtgagtgtttcgatttcaaagtttctgtcttccagtgttttcagcatttgctgtcctacggctcccgtcgctccgacaactgctacgtgtaatcctcttcccatctgtaaaactccttccgccaattaagcatcatttgttgaattgactttgcattttacgttttattttaccatagaatagtcacggattgaccgaatttttttattccggaatgattttctgtcatcatgattttttattcatgatggtgtacgagcaccggctgaacctgctggtgcaaaagagctttttctaccgtaatcggaaggagatccattctggcgacgagcgatgtcggttttttcacgtggtcatcctggccgaacgggatgaaatatatgttttttgcggacatcagcctcattaaattcgttccgtttaaaccgagtccgtcatttgtcgaaattccgagcacgaccgggcggccgttgcggatcgtggctttcgcagccataaggacggggctgtcggtcatcgcatttgcgagtttgctcattgaatttccggttaaaggggcgatgaccatgcagtcgagcggaagtttcggcccgagtggctccgcttttacgatggaatcaatcgcctcaaagcctgttgtttcttcaatttttctgacccaatctcccccctccccaaagcgggtatcggtcgattgaacggttgatgtcacgaccggccggacttcagctccttgactgataagcgcctctatttgcggaaacacttcctcatatgtgcaatgcgagccggttaatccgaatccgattcttttccctttcagagacatggttatttcccctctttctttaagtctgccaaaagcttgctcaatacgttcgcaataatctgtccggctgttttcggggccacaattcccggaagacccggagcaagcagcgctttaatgccttgtttttcagcatatttgaaatccgttccgcccggacgggatgctaaatccaaaatcaaggtcttgggcgtcatgcgcgataaaacgctttgattcagaatcaagctcggtacggtgttaatgcagatatcaatatcatttacatgatcagtaagctcttcaagttgaaaaggagaaagccccatttccgatatacgggctaaatgagccgaactccgcgcgcccacttttactttcgcccctaacgctgcaaacgtccgggcgatcgtcataccggtgcgccccatgccaagaacggcgacatttgatccgtgaatggtataatccgtatgctgaatcgccatcatgattgttccttcaacagtgggaatcgagttgaatatcgcgatgtcgtcccgctcaaataatttcacaagcttacggccggcttcgctggcgatcccctcaagatacgcgttggagatgcctgaataaatgacgcaatgctccggtgtccgctcaagatagctctgctttaataccacttcttcatttgaaaaaaccgtggaaacaacgccttctccggtcgttgccgatacaggcaggatgatactgtctattttttgaaagggaatctcatcaattttgcatttgacggttcctgtaaaaccgtcatccaattggtcaaaccctgcaagataaatatcggcatgctgttctgtcagctttcttataatctcaagctgtcttgcgtcaccgccaatgatcgcaattgttaatccggttaacatctgaaacgttcaccttctttacagttactggatcctttaagtgtcatcctcctcttcatcgtatgtgcaaagagaaagggcggtgaatgtacagcgtctttttcataaaaaaagcaccggctgtatgagccggtgcttgcaaaaaatgaataagatctactcttcgggaggcgtgatctcccccggaacgtctaaaatgatcatgtctgacccgattttttggatatggttccaggggacgcggatgtcgtggccttgttttcgcagtccgaaccattttaccgtcggtatcaacagcgcggtaatttgtccgtcctgttcattaatttccaaatcggtctggccgagcacgccgagccgctctgcccgtttaatatccacaatttctttacctgacagttcactgagcctcatgatagccacccccttgtactatatgacccggagcaaaaaaaaatgcctgccccgtacagaggcagactgctttgcagcttaagacgaggccggtatattgccggtcgggctgatgagcgatagtgcgtaatcatccgtaaataagcggcggctgaggccgttgacgctttccaggctgaccgcatttaattcagcgataatttcatccatggtcttatgctttccgagcaggagttcatttttcccgttccggctcattttgctgtttgtgctttctaagctgagcattaagctccccttcatttgctctttgctgttttccagctctttcggggtgataccgtcacgttttagaaccgataacgtttcctgaatggtttcagacagaagtccgagctgattcgcgccggtgcctccgtaaatcgtcagcataccgctgtcttcataggaactgtgatagctgtatacagaataggccagtcctttatcttcgcgcacatcctggaaaagacggctgctcatgcttccgccaagcacgttgtttaagacgatcaaatcgtaaatgtccggatctccgactttcaggcctttgaaaccgagacagagatgcgcctgttcggtgtctttttttctcgtcagcttttcataatgaaactcaggctcgctgatgccgcttgctttgcccttcgcttcgtatgtaccgaaccatttctccacgtctttaatgaattgttccgttacatttccggcgacagaaatgacgacgcggtccggcgtgtaaaagtcatccatatgctgtctgagagaatcgccgttaaacgacgaaagcgtttcctccgtcccgagaatcgggtatccgagcgaatgattgccgtatgtcgctttgctcagcagatcgtggacaatgtcatccggtgcgtcttcatacattttgatttcttcatatacgacgttcttttcttttttgagctcatcttcgtcaaaagcagaatgaaagaacatatcagccagcacatcaagtgcgtagtttgcatgctcatccagcactttggcgtaatagcacgtatattcttttgaagtgaaggcattcacttggccgcctatccgatcgaaggattctgcgatttcacgtgcggacctggtatttgttcctttaaaaaacatatgctcaagaaagtgcgaaataccgtttgtctccggcgtttcatgacgtgatcccgtcccgatccatacgccgattgccacagaccgcaccgttggattattttcaagcacaactcttacaccgttttggcatgtatagcgttttatcaagtctgttcctcctattcaaagacaggcagctgcctgctacttcatcagcctgttttcatccattaagtcagacactgagccgagcgcgtagcctttttctttgatttttgcaatcagtgtatccaggcttttcgcagtcggatcagtcggatgcattaaaatcatggctccgttatgtattttgctcagcacccttgtttgtaaaacagcgggagacggtttttgccagtcaatggtgtcaacggtccacatgatggtgcccattcctttttccgccgcaaggtcgaccacggcttttctgaagctgccgcttggcggcgcaaaccatttcggcttcatgccgagcgtctcgctgatttgtgcattggttttgtcgagctgttcggaaatgcttcctgaagtcagtttgctcatatcagggtgattgtatgaatgatttccgatttcatgtccgtctgccgctatttttttccccagttcctgattgtttttcagccatttcccttcaagaaagaaagttgctttgacctggtgctgcttcagaataggcagcatttgctccacgtattcatttccccaggcgacatttatcaggaaagcgaccatcggtttgtcgggatttcctttataaatgggttcgggcgcgagagaatcaagatggactttcggctttacctgctcatagacaaggtcgtcttcgtgaaattctccgtcctttttcatttgtttataggatttttccacattgacttttaaaccgttatatcccggtatactcttccatattttatcaatccgagcgtcttgcggcttcacttcatactctgacgctttttgcagtaattcttcatagagcggatcttttgatgatgacacagttaccgcgtcttttttcattgcgtctatgtaatcaactgtatacgggttttttaacatttcaaacgaaacaaaaaaaagaaataaaaaaacggcaaacggcacgaattttttcaacatgtccttcccccctcatcacacattatgtatgaggaggacaaggtagaacccgtctgttgtctttctcaaaataaagaagccgggtctcccaggctccttgttaggttttcatttaagattgttgttgttcctgttctttttctttctcttcgcgcagcactgctttacgcgacagattcactcgtccctgtttgtcaatttcagttaccttcacaaggatttcgtcaccgattttcacaacatcctcaaccttgccgacccgttcgagcgctagttcagagatgtgaacgagaccgtcttttccgctgaagatttcaacgaaagcgccaaatttctcaatccgtttcactttaccgaggtaaagctggccgacttcgacttctctgacaagatcttcgatgatttttttcgctttttggttgctgctttcatcagtagaagaaataaagatggtgccgtcttgttcaatgtcaattttaacaccggtatcttcaatgattttgttgatttgtttaccgctcggtccgataacgtcacggattttatccggattaatggtcatcgttaaaattttcggcgcatattgagaaagttcttttcttgattcaccaagcgtgctgagcatgctgtccaagatttccattcttccttttttcgcctgctgaagcgcttcttcaagaatttctcttgaaaggccttcaattttaatgtccatttgcagcgctgtcacgcctttttccgtgccggctactttaaagtccatgtcaccgagggcgtcttccatcccttgaatatccgtcaatactgtatagtactcgcctgatttcacaagtcccatcgcgatacctgcaacaggggctttaatcggaacacctgcgtccatcatggcaagcgtacttgcgcagatgctggcctgtgaagtggaaccgtttgattcaagcacttcagatacgaggcggaccgtatacgggaagtctttttcattcggaatgaccggctcaagcgcacgctctccaagagcaccgtgaccgatctcacggcgtcccggtccgcgcatcgggcctgtctcccctacgctgaactgcgggaagttataatgatgcataaagcgttttgactcttccacgcctaaaccgtcaagaatctgaacgtctccaagggcgcctaatgtacaaacgctgagcgcctgcgtctgtcctctcgtaaacagcccggatccgtgcgttctcggcagaagaccgacttctgaagaaagcgggcggatttgatcaacgccgcggccgtccggacggactttttcttctgtgatcaaacggcgcacttcgtttttcacgagtttagacagtgtctgtttcacttttttaattgtatcttcatcatgctcttcttcttcgaatttcgcgacaactgcatttttcacttcattgatcgcgtcttcgcgagcatgtttttcgtgaacctgaatggcgctgagaagatccggctccgcaaggctttttacttttgcgctgagctcttcgtcaatttcatacagttcgatctctgttttctctttgccgactgctgcgacgatttcttcttggaatgcgatcaggcgcttgatttcttcgtgaccgaacataatcgcctcaagcatgatttcttcaggaacttcatccgctccggcttccaccatgttgatggcatcttttgtgcctgcaacgatgaggttgatatcacttttttcaagctggtcaaccgtcggattgatgacgaatttcccgtcaatgcggcctaccgtcacacccgcgatcgggccttcaaacgggatatcggaaacgcaaagagcgagtgatgaaccgaacattgcagccatttcagatgagcagtcctgatcaacactcatgacaatgctgatgacctgtacttcgttacggaatccgtctgcgaaaagcgggcggatcggacggtcgatcagacggctggctaaaacggccttttcacttggacggccttctcttttaataaaaccgcccggaattttacctactgcgtataatctttcttcatagttaacggtaagcgggaaaaaatctagcggtttcggttcttttgatgcggttgctgtgctgagcactgcagtatcgccgtagcggaccatgacagcgccgtttgcctgtttggcaagctggccggcttctactgtaagctgtctgccggcccaatctatggtaaagacatgtttctcttgtcccattcgattacgagctcctctcttaatgtgtgaaataatcaattactcctattatgaacgaaatgaattgaacatatcaatgtcaaagtagtatgtaaaaggatttcattgtttttttattattatttttttcgctttaatacgataaaaaagcgggaatcctcccgctttttacgattatcgacgtaagcctagtttgttaattaactcacggtaacgagttacgtctttattacgcagatacgtaagaagattacgacgtttacctaccattttaagaagaccgcgacgtgagtggtgatctttcttgtgagtacgcaaatgctcgttcaagttgttaattgagtctgttaggatagcgatctgaacttctggagaaccagtatcagattcgtgtgttttgaactcgctgatgagttgatttttacgctcttgagtaattgccatcctgtttcacctccatatcataattagccccagttacctagcaaccgtcggtgacttcggattgccaagcaatggttttaagactacgaaacatatgatactaaaaatcgcgcccatatgcaaatcttttagaataaaatttgtgtacttttgatgttttttccgttatttgctgaaaaaacggatcgcttcttgtttgtctttcccgatctgagccgtcagttcatcgatgccgttaaacttccgttcgcttcggattcgtttgtaccactcgattttaacgtcttctccgtatacatcctgttgaaaattaaacaaatgaacttcaattgacggctgatcgggacgcttttcataaaaggtcggtttgtagccgatgttgcagacgccttcatacacctcgccttttatttcggctttcactgcatacacgcctgtcggcggcacgatatagctgttgtgcaggccgacattcgcggtcggaaaaccgatggtgcggcctctcttgtctccgtgaatcacagtgccccggagaaaatacggctggccgagaagagtgtgcgcaagttcaacgtcaccatcctggagcgctgaccggatataagtggagctgatctttctgtcctgctcggtctgtttctcgacagtcgtgcatccggccttgccgtttaaatcgtccggcagcgtctccatcgtgccttttccgtattttccgtacgtaaaatcgaagcctcccacagcgtgccgcgcgttcaaccctaaaatatactcctcggcaaactgttttggagacagagacgcaaacgcttcatcaaactttacgacatacagcacatcagcgcctaaacgtccgatctggctgattttatcttcaagcggcgtaatcagatcctttggctctttgtccctgcccaacacatgggaagggtggggatgaaacgtcataacggccagcgacaggcctttttcttcggcaatttgtctggctgttccgattactttccggtgtcccaaatgaacgccgtcaaagtagccgagcgccatgacagacgccggctgctcttctttttgtaaatgatgcggatgagaaatatgtatcgtcttcacagaacggtcaccttttttcttattgttcgcttttttgcatgagcactttagccggtttcagcagtcctttttttgaaggatgcggcatataaatggccacacattctccgtcttcagtacagaccgctatacgggcgtcagctgtcattgcagaaaattccgccgggatgtcaaacactgacccgttttcagctttcttagctaatgtatcacttatgacccatttcggcaaatgattgagcgctctatcgatcggcacggcatgctctgcaaccgttccgtccgaaacctgctgttcaagttcctcaaacgtgaaacactcatcaaggctgaaatcgccggaagcagtgcggatgagatgcgacatatgcgcgggatagccgagtttttcaccgattgtcaccgccaacgttctgacgtaagtgccttttgagcacgtgactgtaaagcggaatgatgctgtgtcttcgttataagtgacaggggaagtgagcgcgatatcttcaatcgtgatattccgcttcggccgctccacttcaatacccgctctggcgtattcatagagctttttcccgttgacctttaccgcggaatacatcggcggcacttgctcctgcggtcccttcaattcgtctaaaacggctttgatatccgcttcttccagcggctccctgacaggctttacgctgaccgtttctcccgtctgatcttcggtcgatgtggagaaaccgagagtgatctcagcatcgtacgtttttgacttgtcggtgacgtactcaacgatctttgtagcccgtccgacacagatcggcagtacgcctgacacttccggatcaagggttcccgtatgcccgactttctttgtttttaacagttttcttattttcattacacagtcgtgagaagtcatgccgaccggtttatgtaaaaggagaactccgttaaccatctgtctttcgctcctttgttatcaattgtatcccgtaaaacgcagaaaagaggacagacgacactcgcccatcctctttcccgttattcagacggtttatctgaatgcagttcgtgaatcaatgtttcaatacgattgccgtactcaattgattcatcaaattcaaattcaagctcaggcgttttgcggagtctgattcggctgccgatttcggaacggataaatcctttcgctttctcaagccctttcagcgcctcttctttctttttctctccgccgagaacggagatatacaccttcgctatttgcaaatcacctgaaacacgtacgtctgttacagtgagaaatccgattctcgggtctttcagctttcggctgataatatccccgagctcttttttcatctgctcgccgacacggtttgctctcatactcaattcaatcacctctaagttaaaaccactctgttctagtgatcgtccgttctatctcgggaaaggagtcaataaacgcgagtacgcgctggatctccttttccgcctgaacgtgagaggaagagacgacagcgattccgaagctggtccgctgccaagtgtcctgatagccgatttctgcggccgacacgttgaacttattctgaaccctcgttataatccgcttcagaacggctcgtttctcctttaatgatcccgcatcataaatgatgcattcacattccgcaaatccgatcactttctttcgatttcctgcatgacatacgcttcaaggacgtcgccttcgcgaatgtcattgtatttcttaatcgttataccacattcatatccttgtgaaacttctttcacatcatctttgaagcgtttcagaacgtctacttccccttcgaagatgaccacgccgtcacggatcaggcggagtccgctgtcacgtgtaatgtggccgtctgttacatatccgccggcaatcgtgccgattttcgacactttgaatgtttggcgcacttcaacctgaccgatgactttttcttcgtattcaggatcaagcattcctttcatcgccgcttcaatttcttcgatgactttgtaaatgatacggtgaagacggatatctacattttcagcttcagccgtgctcttagcatttccgtctgggcgcacattaaacccgataacgattgcatttgaagctgatgcgagaatgatgtctgattccgtaatcgcaccgacgcctgtgtgaatgattttcacttttacgccttctacttcaattttttgaagagcggctgttaacgcttcggctgaaccttgaacgtcagcttttacgattaaattgatgtctttaacatcgccttgtttaatttgttcaaacagatcatcgaggctcagcttcgctttgtcgctgcgctgttcttccagttgcttggaagcgcgtgcttcaccgacagaacgggctgttttttcatctttaaagacgaggaattgatcgccagcctgcggtacgtcgtttaagcccgtgatttctacaggtgtggacggtccggctgttttcacgcggcggccgagatcattgaccatggcccgcacgcggccgaatgtatttccgacaacgatcggatctccgacatgcaatgttcccgtttgaacgagaagtgttgcgacagatcctcttcctttatcgagctcagcttcaataaccgttccttttgcctgacggttcggattggctttcagctcttccacttcactgacaagcagaatcatttcgacaagctcgtcaattcccttgcctgtaagagcagacagaggaacgaaaatcgtttctcctccccatgcttcaggaacgagtccgtattcagtcagctcctgcatgacacggtcagggttcgcgctttctttatccactttattcacggcaacgataatcggaacctcagccgctttcgcatggttgatggcttcgactgtttgcggcataacgccgtcatcagccgctacgactaaaatggtaatatcagttacttccgcaccgcgcgcacgcattgttgtgaacgccgcgtgtcccggagtatctaagaacgtgatttttttgccgttttcttcgatctggtacgccccgatatgctgggtgattccgccggcttcaccttcaacaacctttgtttttctgatgctgtcaaggagggtcgttttcccgtggtcaacgtggcccatgatcgtcacgacaggcggacggatttgaagatcttcttctttgtcagcctcttcatatttttcaagctcagtttcttcaagcacaatcacttcttctgtttccacaccgtattcagatgcgatcagttcgattgtgtctttgtcaagctcctggttaatggtagccattacacccagaagcatcagttttttaatgagttcagacggttctttgccaagttcttcggctaaggccccgactgttaaagagccggaaaacgtaattttctcaggaagctcttttttcggcttcagcggtttttgctgatactgatttttgttgttatgattgcgtttgtttttgtttttgttgttgttgttattcttcttgtttttgttaaattgattattctgcacgtcattcttctttccgtctcgaattttgtttggttgattcccagcaggctgctgattaatcccttgcggcttgtttttgttcgtttccgcaggcttctgagatgtaacgccggcgccgccttttttaaatttcgcatcaagctgcttaatggtcttttcttcaagcattgccatatggttatttactactatatccatgtttttcagcgcagtcaaaatttccttgcttgaaacattgatggcttttgcatattcgtaaactctcattttagccattcgttcacccccaaaaatattaatcgagcaagctgatcagcttattcgcaaaaccttggtcagtgacggcgacaacgacacgtgattccttgccgatagagcggccgagatccgcgcggctttcgacttttttataaggcactttataataattgcatttatcggatactttttttgcagtattcgcagatgcatcttctgtcagcagaacaagttttgcacgcgcatttctaatttcttttataaccaagtcctcgcccgacacgaccttacgagctcgattggccagacccagcaagggaaaccattccattccagacatgttattttttcaccttttccgccagttccagcaattcttcgaaaatctggtcatcgatttgtgattgaaattgattttgcaatgtgtttttctttttcgcagctaagatgcattctttctcaagggtgatataggcaccccgcccgttcttctttccggtcggatcgactgaaatctctccttctttagaacggacaattcggatcagttcctttttaggcttcatttcccccgttaccacgcatttgcgcagaggaattttttttcgcttattcacctaaagtcacctcttattcatccgattcggctgtttcaggctccataaagagcggctctaaatcgtcatcttcttcatgctctctcggatagatgccaaggtctcttgcatccgtttcacttttgatatcgattttccagcctgtcagtttcgcggctaagcgggcgttttgccctctttttccgattgccagagaaagctggtaatcaggaacgatgacagtcgtggctttttcttcttcgctgacgatgacatccagtactttagacgggctgagcgcattggcaacaaattcaaccggatcatcagaccagttgacgatatcaattttttcgcctttcagttcattgacgatcgcctgcacccgctggcctttaggaccgacgcatgaaccgaccggatcaacgtcagggtcatcagtgcggacggagattttagagcggtcgcccgcttctctggcaacggatttcagttcgaccgttccgtcataaatttccggcacttcgatttcaaaaagacgcttcaacagaccaggatgcgttcttgatacatagatctgcggcccttttgtcgttttttcgacttttgtgataaatactttaatccgatcgtgcggtttatagctctcattcggcatttgttcattgacgggcagcagcgcttcaatcttgccgagagacacgtaaataaacttgctgtctaagcgctgtacaattcccgtcatgatgtcttcttcacgatcgataaattctgagtaaatcacgccgcgctcagcttcacggacacgctgcgtcaccacttgtttcgccgtctgcgcagcaatgcggccgaagtctttcggcgttacttctatttcaacgacatctccgacaaggtagttcggatggatgtgctgggcgtcgtcaagcgagatttcaagtcttgaatcgtatacctcgtctacgacatcctttcttgcgaacacgcgaatcgtgcccgtctcacggttcagatcgacccgtacgttttgcgcctggttaaaatttcgcttatacgcggaaattaaggcagcttcaattgcttcgatgataatgtctttactgatgcctttttctttttcaagaatagtgagagcatctaatagttcactgctcatgttagcggtctccccccttaaacactaatacttcattcattaaaatgttacagctaatcttgcgttagctattttttcatacggaatattgacccgtttctttcttgttttgaccgtcatctctattgtaacagtttgtccatcaaattcagccaatttgccttcaaacacttttaaaccgtcaatcggttcgtacgttttcatgtacacatttttgcccagtgatttttcgaagtcggcttttttctttaatggacgctcggctccaggagaagatacttcaagaaagtagttctgagtgatcggatcggcctcatccagcttttcgcttaacgcttcgctgactttggcgcactcctcaatatcaacaccgttatcggaatcaataaacacgcgaaggaaccagttttgaccctctttgacaaattcaatgtctacgagttcaagctgaaggtcatccagtatgggctgagccattccttgaacggtatcagtcacttttttgctcatgtttttcctccttgtgctgtcgatatcatatcagccgttcctctgcataaaaaccctgcttcaaaagagcaggggcattgagaaaacgatggacatgtcgaggcaaaattgcctgttcaatacaaaagagcgggtttccccactctttgcctcggtaatcgttagcatttccaataaaactataccataaccatatatttaatgcaaatcaaactccgctcggaggctgtgcacaaagcttaaaacagagacagctgattttggtccggaagcgactcaagacagccgtgacggtctaaatactctaaaatggtttttgacacttttcctcgtttttgaagatcctcttttgaaaggaactccccttcttcccgtgctttcacaatattgagagcggcgttggttccgagtcccggaattgagttgaacggcgggatgagactgttgccgtcaatgataaattccgaagcgctcgaacggtatagatcgaccttctggaaggaatagccgcgctcacacatttcaagcgcaagctctaacacggtaaggaggtttttctccttcggcgaagcatcaagccctttagagctgatatcatccatcaccgctctgatggcggtcgagcctttaatcattgtatcaatgtcaaagtcatctgcgcggacggtaaaatacgcagcataatataaaagcgcgtgatgcactttaaaataggcaatccgcaccgccatcagcacgtatgcggcggcgtgggctttcgggaacatgtatttgatttttttgcatgaatcaatataccagttcggcacattgttctttttcatttcttcttcccattccggcgtcaggcctttgcctttacgcacgaattccatgattttaaaggccagtgaaggctcaaggccctgataaatcaagtaaaccataatgtcatcacggcagccgatcacttcgctcagttcacacgtattgttgtgtatcagttcctgcgcgttgccgagccatacgtccgtgccgtgggaaagcccggaaatctggacaagctcggagaacgtcgtcggcttcgtatcctcaagcatctgccgcacaaatcgcgtcccgaattcaggaataccgagcgtccccgttttacagccgatctgctcttcagtgacgccgagcgattctgtaccttggaaaatcttcataacttccggatcatctgtcggaatcgtcttcggatcaattccgcttaaatcctggagcatccggatgactgtcgggtcatcgtgccccaatatatcaagcttcagcaggttgtcatgaatggagtggaagtcaaaatgagtcgttttccattcagaccccgtcgcatctgccgggaattgtatcggggaaaaatcgtaaatatccatgtaatccgggacaacgataatcccccccgggtgctggccggtcgttctcttaacgccggtgcagccctgcaccagacggtcgatctccgcgccgcgcatgtgtaggttgtgatcacccgcatagcctttcacatatccgtaagccgtcttttccgcaacggtgccgatcgttcccgcgcgatacacgttatcttcaccgaacagcactttcgtgtagttatgggcatggggctgatactcacctgagaagttcaagtcgatatcgggtactttgtcacctttaaagcctaagaacgtttcaaacgggatatcatgcccgtcctttttcaaaggtgtgccgcaagacgggcagcttttatccggaaggtcaaaaccggaaccgactgatccgtcattaaagaattccgaatatcggcagctcgggcacacatagtgcggagcgagcggattcacttcagtaatttccgttaaggtcgccacaagcgatgaaccgacggacccccgggagccgacgagataaccgtcatccagagaccgttttacaagcttatgggagatgagataaataacggcgaatccatgaccgatgatgctttttaattctttttctattctcgcttccacaatttcaggaagctcttcaccgtaaatgcttctggcgcgctgatagctcatttcacggatttcttcatcggctccgtcaattttcggcgtgtacagatcgtctttgatcggtttgatctcattgatcatcgaagcgactttctgcgtattgtcaaccacaatttctttcgctttttccgcaccgagaaaggagaaagcatccagcatttcatctgtcgttctgaagtgcactttaggcagttcgtgcctgtttaacgggttggcgccgccttgggaagatattaagatcttccggtaaattttgtcctcatcgtttaaatagtgaacatttccggtggcaacgaccggcttattcaatttttccccgagcttcgtgatgttggcgatgatttctttcagcgctttttcatcccggacgagctcaagctgcagaaggtgtctgtatacttccggcggctgcacttcaagataatcatagaatgatgcgatatcttcaacctcttcaggtgatttttgcatcatgccttcaaagacctctcccctgtcacaggcagagccgattaacagaccttctctgtatttattaagctgcgacctcggaatgcgcggcactctgtagaaatattgaatatgagaaatagacacgagcttaaacagatttttaaggccggtctcatttacggcaagcaatgtagcgtgataaggccttgatctttgataagcattggattgtcccatattctcattcagctgatcatgataaaaaatgtctttttcagcggcatctttgagcattttcaacagcaggtagcccgttgcttcagcgtcaaagaccgctcggtgatgctgggttaattcgatatcaaacttcttacataacgtatttaagcggtgatttttaaactcaggatacaggaaacgcgcgagttccagcgtatcaatgactggatttttcgctttttccgttttcagtagacgcttgtacgccacatttaaaaatcccatatcaaagctggcgttatgagccacaagcacgtcatcgccgatccattctttaaaatcccggacgacgtcaacgacatcgggagcgtcgcggaccatgtcatccgtaatcccggtaagctctatcgtcgttgctgacagcggatggtgcggattggcgaacgcttcgaatttatcgatgatttctccgcctcttattttgactgcggcaagctcaatgatggtgtcatacactgcggacagacctgtcgtttcaacgtcaaagacgacgtatgtgtcttcttccaaaagacggtgagctggattgtatgcgatcggaacaccgtcatccacgatattggcttccattccgtaaatcattttaatgccgtgttttttcgcggcggaataggcatccgggaaagactgcacaacggcatgatcagttaacgcaatcgcttcatgtccccattttttcgcctgttcgacaagctttccgatgcccgttacagcatccatttggctcatcggagaatgcagatgaagctcaacccgtttttcgccttcaggagcggtgtcttcacgggttttggcttttatttcattcacgtcatttgcaatcatgacgaggtctctgacgaatgtatcgttttgaatgcttccccgcgccttcacccacatgccttttttcagcgttttcatcaaagcggcgtcttctttttctctggcgaacatttttactaaaatactgtttgtatagtccgtgattttgaaaatgcagagcgtgcgtccgcttttcagctcgcgtgtttcagcatcaaacacaaacccctgcaccgtgattcttctttcttcatccatgatgctgtcaagcgtccggatttcttcgttctctttaatttgatagccgatgacaagcgggccggacggcgcttgatcctcatcgccctctttttccttcttctccatttcgataagcgcctgcatcgcccgctcctgatcttcagcaagcttttgctcgcggaatttctggacttcttggtcagatacgaaaatttcggtatccagctgcagttccggaaatccgaattggcgatagctgtgctgaatcagtgcgctgtatttatttttgagcgccgatgcttctgtatctgtttttgttttcacgatcagtttgtttcccttgagcttcggcttctgctgattcaaaagagccaccatcggcggcgaggttccttcaagctcttcaatacagcgtgtccaataatcctgtacaagctcctctgtcactgtaggatcgatgacctgaacagacgatgtgacacgggcgatgtgagcaaacgattgtgttaacctcatcatgaatgaatcgtatatttgatacggcaaaagagccttaaagcgaaattggaaatgccaggctttttctgctttatggattgtcagtttatcaatctctccgtcttcaaagtatgtcatgaaggtatcatctgtcatattaagctgctgcagaagaatctgaaactgtcttctgtttactgataactgttccattcagacagtatccctcccttaaaacatcataagtgaaggtacctccgcaggtgatgaggtaccttcttttttctctattttaacatgattttgtacgattcgttatggtgattacttcgtcttaataaattcagaaagctcatccactgaaacttcagcagattcaccggttttgcggattttcacttctacgatgccttcgtcggcacgttttccgacagtgatgcggatcggaaggccgatcagatcagaatcagcaaacttcacgcctgcgcgttcagcgcggtcatcgtataaaacctcataaccttccgtctggaattttccgtaaagctgttcagcaagctctttttgcgcttcatttttcatattcagcgccaaaatatgaagatcatacggagcaacgctcttcggccagatcaagcctttttcgtcgtgatgctgttcagcgatggcagaaagcgttctggacacgccgattccgtaacatcccatcagcatcggctgcgcacgcccgttttcatcaaggtatgtcgcattcatcgcttcagagtaacgcgtgccgagtttaaagacttgtccgacctcaatcccttcagcgaaacggatcgtgccttttccgtcaggtgacggatcgccttcctgaatgattcgaagatcggcatacgcttttacagacgcgtcacgttcgatgtttacgtttcggtaatgacggtctttttcattcgcgccgcaaacggcgtttaccattactttcacggcttggtcggcataaatctcaatgtcgccggcagcgccgatcggccccgcaaatcccggctccgtgccaagtttctccgctacttcttcatgagacgcaagctcaaccacttccgcgttcagaaggtttttcactttcacgtcgttgacctcatgatcgcctcttactaacacgagaacaaatcggtcatccgctttaaacagcattgatttgatgcaggcgctcggctcgatctgcaagaacgaagcgagctcttcaatgcttttgacatttggcgtatcaattttctccaatgcctcgggtgtttcatctgacggctcgctgttcatgacaactttcgccatttccgtattggctgcgtaagaggatccatcggaataagcgatggtatcttcccctatttcagaaagagccataaattcatgcgtgtcttttccgcccatcgcgcctgagtcggcaataacgggacggacgtttaattcacagcgtgcgaaaatgctgctgtatgcgccgtacatgttttggtacgtttcctccagactttcttcagaagcatggaaagaatacgcatctttcatgatgaattcgcgtccgcgcaataacccgaaacgcgggcgtttttcatctctgaatttagactggatctggtaaagagtgagcggcagacgcttataagatttcacctcatcacgcacgagagaagtaatgacttcttcatgtgtcgcgcctaaagcaaattcacggccgtggcggtctttcagacgcattaattcaggcccgtacgtataccatctgcctgattcctgccatgtttcagcctgctgaagggccggcatcagcatttccaccgcgttgattttttccatttcttcacgcacgatcttctgaatgttttgaatgaccctgtaagccaggggcatgtagctgtaaaccccgctcgtattttgtctgataaatcccgctctcagcagaagcttatggctttttgcttcagcatcagccggcacttctctcagggtcggaataagcgtcaaactttgtctcatgtcttcgcacctctgattttttactagtcaattataagaataaacgctggatatcgttccatgtgacaaccagcataagaagcattaagaaagctacgccgataaatacgacaaatgcttccttgtcacggtttatcggcttgccgcggattgcttcaatgaataaaaacagcagccgtccgccgtcaagcgccggtatcggcagcaggttgacgattcccaggttgatgcttaaaaacgccgcaaactggaataggttgataataccggtttttgcaacttgatccgtcatatcataaatgccgacaggacccgaaagcatatcaagcttaaactggcctgtcacaagtttgctcagattggtcaggatcgcttttgtgacatcaacggtagatgtcgcgccgtaagcaatcgctgcaagcgctcctttttcagtcggcgcataagagccgaagcggccgattgtttttttattttcatcttttacagcttcaggtgtaaccgagatatgaaacgatttgccgtcccgtttgacggcgacatcgatttttttcccgggattttcttttaccgctgtcacgatgtcggtccatgacctcattttttcaccgttaatgctctggatatagtcgccttcttttaaaccggcagcagctgcgcgtccattgtctgtcagcttcccgagctcaggctgatttgaaggcacgccttgaatgaatccgagcatgacgagaatgacatacgctaagatgaagttcattatcggaccggcagcaatcgccttaatccgcttccatacgggtttagacccgaattgtcgattgtaaggcgcaatctgcacttcttctccgtctacgataaaaaaagaggtctgactgacagtaaagcccgccagttcatcttctttcccctgctcgtacccggtaatcttcatttcgtgctcaagatcagccgtctccacctcgataattaaagcgtcgggatatttttccttttgattaatgatgactttttccacttcgtcatctttattaaaaagaagcccgacggtataaccgggtttgacttcgatcatctccgggtcttcaccggccatgcggacgaaccctccgaccggaaggagtctgatcgtatacacggtttcattctttttaaatgaaaagattttagggccgaagccgatcgcaaattcacggcaaaggattcccgctctttgggcgagcaataaatgcccgagctcatggaaaaaaacgagcgttccgaaaataataataaacgcgataactgtattcacgaacataccaccttatgtgagtattgaattaacgtatccccgggtgtctttgtccacttcttggatatccgcaagactcggatcctgaattacgctgtggcggtccaatgctttttcaatcaggtcctcaatcgataagaatgaaatccgtccggcaagaaaagcggcaacggcttcttcgttggccgcatttaaaaccgtcggcatcgttccccctattttacctgattcaaaggcaaattgtaagcagcggaacctttcaaagtcagctttcgcaaaatgaaggcttccgatctcccataattcaagcctttttgtttcaggcagaggcagccggtccggatatgtcagcgcgtattgaatcggcaccctcatgtccggatttccgagctgggcgatgacgcttctgtcgtgaaattcaaccatcgaatgaatgatgctctctttatgtaatacaacgtcaatctgttcatacggaatgtcaaacagccaatgcgcttcaatgacttcaagccctttattcatcattgtagccgagtcaatcgtaatctttgcacccatcgaccagttcgggtgattaagggcgtcggcaatcgttacagactcaagctcctgccgcgttttatccctgaaactgccgccggatgccgtaatgatcaggcgctcgatatttttgctctgttcgccttgcagcgcctgaaaaatagcggaatgttcgctgtcaaccggaagaagaggaacaccgtatcgttttgcgtgtcctttcactatatgcccggcagtgacgagagtttccttatttgcaagcgcaattgtttttttctgttcaatcgctttcaaagtcgggattaaaccgacgcttccaagcagcgcattgaccacgatatccacttcgtccatgactgccgcttcaatcaggccttcttctccgatgccgatttgacattcatgcgaaaaagacgcttctttcactttttgatatgtatccatgtcgccgactgctacatatttcggctgaaacgttctgatcaacgggatcgctttctcggcgtttttaccgaaagtcatcgagacgagacggaactgatcttgatgcatgcgcaatacgtctaacgtctgctccccgattgatcctgttgctcctaaaagacaaatattcttcaaaatgccactcccattctatgcgtccagatcggtcttattttcatattagcctttctcatgaaaaaagcgcaagcagaaagtataagaacggcatgacaaacaaaaagctgtcaaatcggtctaaaatgccgccgtgcccgggaaggattttccccgaatccttcacatcatagtgccgcttaagcgctgattcaaccaaatccccgatctgtccgaacacagacagaacaagcgtgatgaccaaaagaaccggatatgaaatcggaaggtgagcaaacagctgaaaaacggccgtaaaaataagggcgatgacaataccgccgagaaacccttccactgttttgttgggactgatttcgggccacagcttccgcttcccgagcgactttccgacgaaatatgcgcctgagtccgttgaccatatgacaacgcaggcataaaagatatacaaaagcccgtttgtttcaatgtttctgatttcaataaaataatgaaaacacagtccgatatataccgtcgcgagaacgataaacccgacttcgtcaaacgtaaaggtgtttttcacgagcaccgtatagctgagcagaatcaatacggcgaaaatcgttacttccattttcgcatcgaaaaaatgatatttgtccggcatcatatacagccataacaacaagaagctgatcagacccggaaaagaaaaaaatctgagctttttcatccgcaaaagctcaaaaagcgctatacttcccatcacgtaaacaaatacggtgaacggcaatcctccgaaaataaccaaaaataaaaatagtgccgctgccagaacacctgttaacagtctttgtttcatttccaccatcctctaaattccgccaaacctccggccccgctgctgaaattctcccactgcctgcagaaagtgatcttctttaaaatcgggccacaggacatctgtaaaaacaaattcactgtaagccacctgccaaagcataaagttgctcagtctgatttctccgctcgttctgatgagcagttccgggtcctggattgattctgtcattaaatgcccggaaaagagcgcttcatcaatgtcttcgatattcagcgtgccgcttttcacctgttcggccaatgcttttgccgcattgacgatttccgtgcgtccgccgtagttcaaagcgaaattgagaatcagcccgtcattttgttctgtatcttttacggccttctcaatcgccctgtacgtatgagaagggagcgcggattcatctccgataattttcacctgtacattttcctctatcaattcaggaagatacgtattcaggaactcttccggaagcttcatcaaaaagtcgacttccatcttcggtcgcttccaattctccgttgaaaacgcataaagagtcagaactttaacgccgagctgatttgcgagctttgtcaccctttttaccactttcattccttcatgatgtccggcaatccgcgggagtgagcgcttcttcgcccagcgtccgtttccgtccataataatggcaatgtgtgcgggaatttcacccttcagtatgtcttcttttgtataccgttctaagttggaagccgcattctgctgattcttccaatttttgagtatgttgagcatgagattcctccgtcacccaaaaaggttgcgttgctgatgatcaatgtaatcaacagtattaacaaaaaaaccccctgtaaacatgagagggtcttttcacattatctattgtacatagtttttcattaaacttccatgatttctttttctttgtctttcgtgacgctgtcaatttttgacacatattcatctgtcagcttttgaacgtcttcactggaagcacgaagctcgtcttctgtaatgtccccgtttttctcaagttttttgaggtcgtcgttgctgtcacggcggacattacggactgctactttcgcttcttccgcgtattttttcacgactttgacaagttctttacgtctttcttccgtcagagccgggatcgcgatgcgaataattgtgccgtcacttgtcggagttacgccaaggtcagctttcaggatcgctttttcaatatcgccgattgccgttttgtcatacggtgtgacaacaagcatacgcgcttcaggcacattgatggaagacagctggtttaaaggtgtttgggcaccgtagtattctactgtcactttatccaatagagatgggttggcacgtcccgcgcggactgacgccaattcacgtgaataagcggcaaccgctttttccatgcgttcttttgtttgtgttaatacttcgtttgacaacgttatttcccccttacgatcgttccgattgattcgccgattacggcacgcttaatatttccttcttccataatagaaaagacgatcagcggaatatcattatccatacatagtgaagaagccgtagaatccatgacttccagcccgtcttttaacacatcgagataagataatttttcgtatttaacagctgactcatcttttctcggatcggcattatacacaccgtcgacattatttttcgccattaaaatcacatccgcttcgatttcagcggcacgcagcgctgcggttgtgtccgtagagaaataagggtttcccgttcccgcggcaaaaatcacaacgcgttttttctccaggtggcggatggcttttcttctgatataaggctcagcgacctgacgcatttcaattgatgtctgcactctggactgaattccgagcgtttccaggctgtcctgcagggcaagtgagttcatgacagtagcaagcatgcccatataatcggccgtcgcacggtccattcctaagtcactgcctgtttttccgcgccataagttgccgccgcctacaactacggccacttcgacgtcaagctcagcgatttcttttacctgtttagcgatggattggataacagtcggattaatgccgtttccctgctctcctgccaatgcttctccgctaagctttaaaacgatacgattgtattttggtttttccataataacctccaagtgtaaacattgccgtttcctattatgcaagagaaaaaaaggtttgtaaatatagttttaaaaatagggaacacaagtagtgtcccctatactgcctgaaaagccgcgaaagattcgccaaggctttccgccattattttttcacttggttcataacttcttcagcaaagttttcttggcgtttttcaatgccttctccaacttcgtagcggacgtaagttttaacagatgcgtttttcgcagccacaacttgtttcactttttcgtctgggtttttaacgaaagcttggtctaataagcaaatttcttcgaagaatttgttcagacggccttcaaccattttagctacgatgttttccggtttgccttcttgaagagcttgctgagtcaggatctgacgctcatggtttgcttcttcttcagacacttggtcgcgggaaatataacgaggatttaccgctgcaacatgcatcgcgatgtcttttgcaagatcttcgtcagttgttccgctaagaacggataatacgccgatgcggcctcccatgtgaaggtaagcaccgaacgcttcgctgtcttcttttgtaagaacagcaaaacggcgaagagtgattttctctccgattttagcaacattgcttgtgatgtattcttcaacagtagaaccgttttccatcttttgacccaacgcttcttcaagatcagcaggagcgtttgcaagaaggtggtcagcaagcgtgttcagaagctctttgaagccttcgtttttcgcaacgaaatcagtttcagagtttacttctaagataacgcctttgttgccgtcagttttaataagagtagaaccttcagcagcgatacggtcagcttttttagccgctttcgcaattcctttttctctcagaaggtcgattgctttgtccatatctccgtcagtttcagtcaatgcttttttacagtccatcataccagcgcctgttttttgacgcagttcttttacctgctgtgcagtaatagccatttgaattcctccttatatgtgtaaacaagatatgtatagatacatttttcttgaaaaaaggtgataaaaggcagtccctcttatcaccttttgattaggttacgcagttgtcgtttctgtttcaggtgcagtctcttcagcagcttccgcttcttcttcgccttgcttcgcttcaagaatggcatctgccattttagaagtaagaagtttgacagcgcggattgcgtcatcgtttgcagggattacgacatcaatttcatcaggatcacagtttgtatctacgattccgatgataggaatgttcaatttgcgagcttccgcaacagcgatgcgctctttgcgaggatcgatgatgaataatgcatcaggaagatccttcatgtctttaattccgccgaggaatttttcaagacgctctaattcttttttcaattgaacaacttcttttttcggaagtacttcaaatgtaccgttttcttgcattttctcgatgtctttcagacgcttaatgcgtttttggattgtttcgaagtttgtcagtgtaccgcccaaccagcgttggttgacatagtacatgccagagcgtacagcttcttctttaacagaatcctgagcttgtttttttgtgccgacgaaaaggatttttccgccttcagcagcaaggtttttcgtgaagttgtaagcttcctctacttttttcactgttttttgaaggtcaatgatgtagattccgttacgctccgtgaaaatgtaacgcttcatttttgggttccagcggcgtgtttggtggccgaagtgaacaccagcttcaagcaattgtttcatagaaataactgacatgtgatttcctcctaataaaatggtttttttcctccgcttaggtcatttttgtgcagaactgccgtttgcagcaccctctgcataaatcgttaagcgtgtgtatttaacaccaagacataatataacacagctttatgcgacaatcaagaatcctttacagctttgccgcgaaattttaaaaacagctcgatttctgtctttccgctctgcacccgtttggcgatttccgcaggggtgagcccttgttcatataattctgaaacacgttcttcaaacgaatgcgcaccgttgttttcgtcactttcagcccgttccgttgcactgatgagcttttccatgtgatccggaatatcaggctcttttttcggttccggccggggttcggcgtcttctgcgtcaggcgcttgatcattccggctttttgtgtcttcgagtctttcattttcttctttcagctcaagcagaaacgctgcaagggtgttttccgtctcttcaagaatcttcttctgctggcgctccgtctccttgagggctgaaaacctcgtgtacagaataatgacggcataaagcagtacgccgtgaagcacaaagcttaaaagccataatagtgttgacatgtttttcactcgctaaccatgagttcattattgaattactttttcaagcaggtgctttaatttaaacagcgcctttgaatgaatctgtgaaatccgcgacgtcgaaaggttcaggacttgtccgatttcggtcaaagtcagttcttctttatagaataaactgacgacaagctgctctttttcagagagctcgtgaattttgcccgcaagctgagcgatcagctcgtccttcatgattttttcttccggcggcacatttttgtcatctctgatcatcacttgaatattctcaccgtcatcctggtcgtgaagcttttcatcaattgataagagattggcaaaaaacccttcattcatcgttgatactacgtcctgctccgtcatcccaagctcttctgcgatctctgaaggcgtcacattccgaaggtagcgctgttcaagtttttcgattgccgcttcgactttttttgtcttctcccgtgaagttctgggcagccaatcttctttacgcagcccgtcgatgattgcaccgcgaattctaaacgaggcataggtatcaaattttaaatcccggccggggtcaaatttttctagggcatcatataaaccaagcataccaaggctcattagatcgtctttatgcaccgatttcggcagtccgacggaaattctgccgacatgatatgtgaccaaaggcatgtaacggcgcattaaatcatcaccggctttaggatctttccactctttccagcgcgaccaaagcacctgatcttcataattcaaggattgcattgttatccccctacctcatacctttattaaatcgttgtttcaccttgtttaacagttcgaatgtgcagcatgcaggactttggctcaaattcaatcgtccggccgcttgagccgcccgtatcttcactgatgaccggaatgttatacaatgaaagctgctctttgatagccgctacattcctcggaccgattttcatcaggtcgtttgtcattttaaacttaaacatctccgctcccccggcgagttttgccttcagggcaaacttgcggcagccggctttcaaaagcatatcaattgtcatcttaacggcggtgtccgcgtattttgcacggttgagctccgccgtttttgataaaccggagtccggcagcatgacgtgaacgagtcctgccgtttgtttgtctttatcgtataaaaccagccccacgcatgaaccgagtcccgaagtccggattttatccggataacgcgcgacttgaacatccgcaatccccactttaacgactgcggcttccgcacggctcataaagccgcacccaatgagacgaagagcttttcaaaagaatcatagtccgggagcataaacatatgggctttgagctcctgccggctgccctggtcaaaaatagaagtatccacgacaatggcatgctctccgacttggctgagctccatcagtccttcactgataaccgcgccgaacatatcaagtgagatttccggcacgctcgggtaaatctcaagctttgtcaaatcagccaatgccgttaaataggaacctgctaaaatattgccgaactcatgtaaagcagaagaactcaaatgatcttcgcccaactggtcaatatcaaaatccggatttccgatcagctctctgataaactgttccgcctgatggaaaggcatgatgagaaagatagagcctgtcatgtcgccttccattcttaaaaagatactggcgaccggcgtttcagccccgccgaaaaaatcagcgagctcatcaaatgtcaataaagtcgcaaacggcacttccatgtctatctttctgttcagcagctgagccatggcagaagccgagtgacccgccccgatatttccgacttcccgcaaaatatccatctgctcttctttgatcgcttcaaacttactcatgttgtcttttcccctttaagcattcggctctccggacgcagatgccgaagcacctttatccagcaccgcatgcgcatcaataatattgaggagcctgttatcttgcttgacgatctgtttaatccacacatccgtttcctttgtctggctttcaggcgcggattcgatttcattttcatgcacggtgatgacgtcattggcctcatccacgacccatccgacatcggcgtcacggtaagaaatgatgataatccgtgtctcttctgtgatgtcctgttcaggctggttcagacgttttcttaaatcaagaaccggggtaattactccgcgcagattgataacgccgcggatatacgattccacacccgggaccctcgtcggtttttgccacttttcaattgatttcacctgggaaactgagatagcgtattctttcccgtttatcataaacacaatcattttttcacctgttttgatttcagcagtcatgcgggcacctcctcgtgtcgttttagtagatcagcgcattgcaatcaataatcagcgccacttctccgtttccgagaatcgtagcgccggaaatcgcaaagacgttcgtcaaatagtcgccgagtgatttcagtacgacttcctgctgtccgataaaagagtccacgacaaaagcagtggatttatcgccctttttcacgacgattacatggaactgatcggcatcctgttttgaatctgtaatgccgaattcttttttgagatagacgatcggaacgatttgtcctctgaaatcaatcacttctctgtcatgcgtctgcaggatatctttcttatcaataacagccgtctctataatagaagaaatcggtatcgcaaacgtctcttcttccagtttaatgagaagaacggatataattgaaagtgtcagcggaagctggatactgaaaagagaaccttggccttccgcggatttgacactgacagagccgccgagtgattcgagtttattttttacgacatccagaccgacgccccgacctgaaatgtcagaaatttgatcggcagtcgagaagccaggagcaaaaataagctcgtaaatctcattatcttcaagcgtttcagcatcacgttcggtaattacactccgctcgagcgctttttcaagaattttctttctgttcaggccggccccgtcatcttcaacttcaataaagacatgattgccgctgtgatatgccttaagcacgacatgacccgattccggttttcctttattcacccgcacttcaggcgattcaatgccgtgatcgatgctgtttctgattaaatggacaagcggatcgccgatttcatcaatcaccgtgcggtccagctccgtttcagctccgatgatggacaattcgattttcttgtttaattccttttgaagctggcggatcattctcgggaaacggttaaagacggtttctaccggcaccatccgcatattaagaataatagactgaaggtcgcccgaaattctggtcaggcgttcaacggtttcagtcagctcattgtggtcaagctctttggcgatctgctcaagacgtccgcggtcaatgacaagttcttcaaaaaggttcattgaagaatccagtctttcaatgttgacgcgaatcgttttcgagccgctgtgatgcttcggctgctcttccgttttcgcttgcggtttcggctgtttttcagcctttttaaccggagtttccttcaccggttcagctgcttgcggtttttcggccgtttttaacggcgcaccggcagaaatttcgacattctccacttctgaaatgccgctgatgagttctttaatttcttcagcaggctgctttgtcaagaaacacacctgaaaatccgttccgaaatcttccgtctcaagcacttccgcggcgggtatcgtttttgcaacttccccggcttcattcagcttttcaaatatcatgtacacgcgcacggctttgagcatgcagctttcattcagggaaaccgttatttcatagcggctgaatccttgctcttccgcctcttcaataacagtccgttcgaactcatcataattccattcagttgaagtctgttgttttgaagccggcggttctgctgtttcggctgaagccgcagtctcatgcgccgcatttacgtcgagcttcgcacttacttcagaaatatcacgtttgccgtctcctccgtcaataatggactgcaccatctcttcaagatgatcaagcgcttcaaacagcacgtccagccaatccgatgtaacgggcatttctccgttgcggatggcgtccagcacattttccatcaggtgggttaaatgcgccagatctgtatatcccatcgttgcgctcatgcctttcagcgtatgggcagctctgaagatgtcatgcacaagctgaaggtctgccggatctttttccaacagcagcagcttttcgttacatgtctgtaagtgctctttactttcatcaataaagacatctaaatattgattcatatccaattgattcacaccctctcttttttcacacatccggtgatggatgccgcgatatcttccacatgtttaatctcatgaatgaggcccgcctttatcgctgacttcggcattccaaacacaacacaggattcgtccgattccgcaatcgttttaacgccgcctgttctgagcatttcttttacgccctcggttccgtcgctgcccatgcctgtcataatgacggctaccttttcgtaaccggataaacggcttgccgaccgaaacaaataatcggctgacggtttatgccggctttccgtatcatgaacatcaagaatgatgcggagccttccgccttcctctgcaaccgtcatattttttccgccgggcgcgatgtacacccatccgtctttcgcttcttcaccgttttccgcttctttgacctgaatatctgacaaatggttgagtctgtctgcaagtgaagcggtgaagccttcaggcatgtgctgaacgacaaatacaggcgcctttaaatccttcggcagtttcggaaccaccttttgcagagcccgcggtccgcctgtagaggtcgcgatgaatacggcctgcttggcggattttgctttcggtctttcaaatcccgccaaagccggacgttccgggatagaagactctttcactgccgcctcaggtttttgtgcgcgggacatcccggctgcaatcaccctctcaatcagctgctctttaattttataaagatcaagtgaaatcgctccggaaggcttagtgataaaatcaaaagcgcccatttccaggcagttgatcgttcggtccttcccttgctgtgtctggctcgataccatgatgacgggaagtttatatatgctgatgatcttccgcaatgtatccgttccgttcatgaccggcatttcaatatcaagcgtgacaacatccggtttgagaagctctattttcttcagcgcctcttccccgtttctggctgtcccgatgacttctatctgcacttccgcagccagaaaatcggtaatcatctttctcataaaagctgagtcatcaacgacaagcacacgaatcactgtaaagtcctcctcaataaaaaagaagataatctctcaataaatgccggtttctcttctcttggtttgttttcttccgtttgaaacaagacatccgtcagaagacggacggacctgctggcttttgcttgaggactttttattaaaaaaggcacctggtcaatgacggcttgacttactagcggatcatcgggtatggagccggcgaaacgcacctccgcgcctaaaaacgtgtggatcgcatgagaaaggcggttgtacgtgtccagcgcctgtttttgagcgcgggcgcgattgacggcaatgtttacggtcagccgttcatccgcgagcaaaagatgtttgatcgcgctgtacgcatccataatggccgtcggctcaggcgttgtcacggcgagaatgtcttccgccgataaaataaacggcagctgttcttttgaaagtcccgctcccatatcaaacagaacgtaatcaaaatcgcttaatacagcggaaagaccattcataaaagccgaccacttctctctgtctgcttgatagaacgcctcaagccccgttcctccggatatgtagcgaaggcctttcggaccggaggaaagtgattgagccaacgcgtgccgattctccatcacatcaataatggtgcgggaagaagcagctccgatcagcacatcaatgttgcccattccgatgtcaagatcaatgatgagtgctttttttcctttttcctgcagggcaactgccatgtttaatgttaaattagattttccgacgccgcctttaccgcttatgacggctaatgtcctcgcttttttctcataaagctccggcttgatcatttgcctctctctcattttccttcttaatgactctgcctgatcgggtttcatgccaaaagcatccttacaaactcttttggtgaagccgataggatgtcttcaggcacatcctgtccatttgtcaaataggcggcgccgattcttgattccgacagcacttgaaacacggagccgagtgaggcggtttcatccgttttcgtgaaaatgaattgattgaccggcacaccggaaaactgtttcagcacctgtttcatatcttcatattttgcagatgccgataatacgagaaaggattgtaagcctgattcaaacggaatcatctcttgtaattccgtaatatactgctcttctttaaagtttctgccggctgtatcaatgaaaacatggtcgtattcagcgaatttttccagtgccttcagacattcttcctttgaatagcatacttcaagaggagcctgaagcagctccgcatatgtcttcagctgctcgaccgcggcaatccggtaagtatccgtcgtcataaaggcaatttttttatgctctgtcagcattgatgaggccgcaagtttcgcaagtgtagtcgttttgccggccccggttgaaccgaaaagcacgacgtattttgattgaatcccttcctgccacctgtctgtcgaagggagttttttcactaacaaatcctgcagctttgagctgacattatcttcagttaaatctccggaaacaattgaagaactgagcaattcactgagtacagcgttttgcgtatgatcaggaagcccggcttgcttcaatagtctctcggctttttttaatggttcagggagcacttctttcaaatgcgccagttcgccggaaatactttgatccggaaggcgcggcggctgaacaggctcagctttctccgccgtttccgtctttttcatttcttcagcggcagccggcggcgtttttctcgcttccctgacgtcacgatctaaaaccgctatcacttcgacggcctgctgcgaccgcagccccagccattttcgtttctttacttgtttggaatgtaaaataacggcatcattgccgagttcctttttgatttgcttcgcggcatcctgcattgaagcggctgtaaatttttttattttcattaaatatccaccactccaatgctctgtacttcaacatttgcttccagctcattataagaaagaaccggaagatcagggaaataccgttctaacagctgttttacatacattctgacagcaggcgagcaaagaagaatcgccgactcctgacggatggaaagctgctcggcctctttagcgacagaacggatgatgctgtccgaaacctcagggtcgagtgacaggtaattgccctgttcagtctgctgaaccccgtctgcaatcgctttttccacccggcctgagcatgtgatgaccttcagcgtttcatgctctctcgcatattgtgccgtgatttgtttggcaagcgactgtctcgcgtattctgtcaaaaggtctgaatctgtcgttaatcttccgtaatcggcaagagtttcaaaaatggtcaccaagtttctgattgaaactttttctctcagcaatttggcaagcaccttttgaatatcgccgacagaaagagggttcggcgtgacttcctcgacaagcacaggataattttccttcagatgatcgatcagctgctttgtttcctgtctgccgaccagttcatgagcatgctgcttaattttttctgtaatatgcgtagatacgactgacgccggatcaacaactgtataccccagcatgtccgcttcatcttttgcagcttcgctgatccattttgcgggaagtccgaacgacggttcaatcgtttcaattccttcaatgacgtcatcttcaggcgtcggtgacatcgctaaataatgatccagcaggagctctcctttagcgacttcattgcctttaattttcaatctgtattcattcggctggagtgcgatgttatccctgatgcgcacaaccggaatgacaagtcccaattcaagcgcaagctgacgtctgatcatgacgatgcggtcaagaagatcaccgccctgccccgcgtctgcaagcggcacgagtccgtatccgaactcaaattcaatcggatcaatatgtaaaagctgcacaacgctttccgggcttttcagttcatccgcctgagcctcttcttcaagaatttcttcctcttcttcgctcggcttatccgctttggacagcatataagcgccgaatgcaagcagaccggcgatcggccccgtcagcagaatgccgatcggtgtaagaagaccgagcaaaagtacagttcccgcggctacatacaagagcttcggataagcaaacagctggcctgtaatatcatgaccgaggtttccttcagatgccgctctcgtcacgacaatccccgtagccgttgaaatgagcaaggccggcatttgagaaacgataccgtcaccgaccgtcagcattgtaaagtgagacgcagcttcttgtatgctcatcccctgctgcagcatgccgattacgattccgaaaataatattgatcatcacgatgatgatccccgcgatggcatcccctttaacgaatttgctcgcaccgtccatggcgccgtaaaaatccgcttcccgggcgactttttcacgtctgtgctttgcatcctgctccgtaatcatgccggcatttaaatccgcgtctatactcatttgctttccgggcatcgcatcgagcgtaaatctcgccgccacttccgatacccgctcggcgccttttgtaatgacgataaactgaataataattaagataatgaagacaacaagccctaccagcacatttccgccgacaacgaaattcccgaatgtctcaacaacctttcccccttctccgtgagaaagaatcgaacgtgtcgtcgacacattgagcgcaagccgaaacagcgtcaataacagcagcaatgacgggaatatcgagaattgcagcggttcttgcatattcattgtggtgagaagcacgatcaacgcaagagagatattaatgatgatcaaaatacttaacaaccatggagggaatggaatcaccagcattgccacaatgaggacaacacttattaaaaccgataaatctcttgttgacatgctgtttttctctccttttgaatctgaaattcgctatactttttgtttcgttttatatacataagccaaaatttccgcaatgactttgaaaaactcttccggcacagcctggtcaatgtcaacctgatcatataacgcacgcgcgagcggcctgttttcaatcgtcatgacatcgtgttctttggcgatctgcctgatttttaatgcaagatggtcgacccctttggcaacaatgtaaggggcggccattttcttttcatcatattttaaagcaatcgcataatgggtcgggttggtaatgatgacatccgctttcggcacttcctgcatcatccgcctcatcgccatttcccgctgcttctgcttaattttggacttgataatcggatcaccctccgattttttgtattcatcttttatatcctgctttgacattctgatatttttctcatagtcaaaacgctgatataaataatcaagcccggccagcagcattagagcccctgatcccgcaagccccatccaaagcgtgagcttagaaacgaaagtgagcacttccgcaggtgttaaaagcggaaggcggagaatatcgccataatgcagccagagcaccataaaggcggcaaaaccgaccacagtaatcttcaaaatggatttgaccagttcaacaatcgccctcatgctgtaaatccgcttaaatcctttcagcgggctgagcttattcaagtcaggcttgagaacttccgcagaaaacagaaaacccacctgcatgtaattgctcacgacacctgccacaagcgcgaccagcataatcggcgcgaggatgaggctgatatctttcaccgtatctacgaacagttcatgcacggaagatgctgacagatgtaatgatatcgatttcgtataaaacgttttaataaaggacagcagcctgtcccgcatataaggaccgagcgcgatcagcgaaagaaagataatcagtaaagaaacggctgtattcacatccgtacttttcgcgacctgtcctttctttcttgtatccttccgttttttcggagtggctttctccgttttttcaccggcaaagaattgcagattcagtctgagtctcatcatgtcacaccgaccaatgccaatagattccgcatggtttcaacggtaaggctgaagatgttgcggacgacgacaaacatcaccgccatacaaacgatcagcataataaagctcacggctattttcagaggaagcccgacaacgaaaacattcagctgcggcaccgttctcgccacaataccgagcgccaaatcaactaaaaacagactggccacaaccggcgcagacatttgaaaagcgataatgaacatggcattgaagctttttgcgataaaaagtccaaagtgatcatttccaaacgacggaaatgcctgatcaagcgggatatactgaaagctgtaataaatcccgtccaataaaagataatgggcgtttacgctgagcataaataacagcgccagcgtataaacgaattgtccgatcagcgggctttgcgttcctgattgcggatcaatgacattggcgatggaaaagcccatctgaaaatcaataaaggaacccgctatctgaatggctgtcatcatcatgaaagcaatcagcccgaggctcaagcccacaacggcctcttttatgacaagcagcatatactgttcccctatttctatttccggcgcatgtttcagcgtgctgaagcagatcaccgaaagaaaaaaagcaaagccgattcggtgaaccgccggcagattccgatgtccgaacaccggcaccgttacaaaaaaagcagagattctgataaagaccaataaaaaagcgggaaataaatcaatgatggaattcatttgattctaccctgcaaatcggttcagatgagagaacagatcagttgtgaacgaaagaatcgtcgacagcatccaaggaccgaaaaagatcagtccaagcatcaccgccacgattttcggaatgaacgcaagcgtctgttcctggatttgagttgtcgcttgaaagatactgacgagcaaaccgacgatcagcgcgatggcaagcagcggcccgctgatcattagtgttacatatacggctttttccgccatggaaattacaaattctgaactcacaattagcacctaccctaaaagctgtcaagcaaagatttcacgattaaataccatccatcgaccaaaacgaaaagcaatattttaaagggcagagagatcataaccggcggtagcatcatcattcccattgacattaagacgctcgccacgaccatatcgataattaaaaacggaataaaaatcataaagcccatttgaaaagcggttttgagttctgatatcgcataagcaggcaccatcgtcgtcaaaggaatatcctgaatcgattcaggttttttcattttggcatagttcataaacagcgccagatccttctgccttgtatgcttgctcatatactctttaatcggcttctcggcttttgtatatgcttcatcgagactgattttgttgtccatcagcggcgttaaggcttccttattaatctctgaaaaagtcggcgccataataaaaaacgtcaagaacagcgcaaggccgattaaaacctggttcggaggcatgttctgcgtcgccagtgaggttctcacaaaagacagaacgatgacgattctcgtaaagcaggtcatcaaaatcagaatccccggcgctactgaaaagacagtcaaaagcagcagtaatttaacagtggagctgacttcggtcggattgcttgaattaaaaagattaacgaattcattcatgatgataagggcctttcttctttccttcagaacggctttgtttcagctcgttcagctgttctttcagcgcttttgaaaacgacggaagcatcgtttgcggctttttttctccatccttacgcggatttacgagcttggtccattccacttttgaagacatcgactcttcgtattggctcagaatcgcctcgcgctctttttcatcttctatttcttttaaaagctgtatcgtttcgcccacaccgactacgagaacgctgtttcccactttaatcagctgcacggaacgattttggccgactgacgttccgccgatattttctacatattgaaacggcttcagcagacggtttcttctattcatcagtttgacaaatccatagatcagcagaatgacgaataataacgccccgatcatctttacaaaatcaaaagcggagacagaagatgcagaagcatcccctatctcttgatcagccgtttgtttcgatgtatcgctttttttctctgttttgtttgttgattgtttgtcaaaccattcgttgacggtggaattatcagactctgccgcaaaagcagggaacggatgtacattgagtaaaacgaaataacaaatcaaagctagtaaaccatgactctttttcaacagtcgtacaccctttagcttaatgttttattaatggcttcaagcacgcggtccgcttggaacggtttcacgataaagtcttttgcgccggcctgaatcgcgtcaataaccattgactgctggcccatagccgaacacatgatgattttcgcctgcggatcgatctgtttaatttcctttagagctgtaatcccgtccatttcaggcattgtaatatccattgtcactaggtcgggggaatgctctttgaatttttcgactgcctgcgctccgtctgaagcttcagctacaacgtcaaaaccgttcttcactaaaatatccttgatcatcattctcataaatgctgcatcgtctacaattaaaattctgtgtgccataatctgtttctctcctctatgttcgcttattttaaattgttaaggcggtctgcctgacttaaaatatcagtgactctcacgccgaagttttcttctatgacaacgacctcgccctttgccacgatccgctggttgaccaggatgtccacaggttcaccagccagcttgtcaagctcaataatgcttcccgcagaaagttcaaggatttctttgacgcttctcttcgttctgccgagctcaaccgtaacggaaagcggaatatccatcagcatatcaaggttattccttgatccttgcgccgcttcgttatgatcaaacgcctggaattctaccggagcgacttgaacaggagcagctttttttgcggttccctgtctcttcggaagctcgggttttgcctgcggctccggctgcatggcaggttccggctgcggcgtttcgtatgtttcctgtggttctgatgcggtttctgcggcctctgactcatgctggtccgcagtcatcaggtctgcgatcagatctttcgcaaacgtaatcggataaagctgcatgatgctcgaatcgattaattcgccgactttcagacggaatgacacttttacgagcaggtcatcctcaggtattctgtcggtccctttttcttccgtcacatccagaagttcaacccttggcggagaaatgtcaatctttttactgaatacggtcgacattgacgtagcagccgagcccatcatttgattcattgcttcctgcacggcgctcaggtggatttcaccgagtgacggatcggcgccccggccgtctccgccgatcatcaaatccgcgatgattgccgcgtcgctttgttcgacgacgagcaaattgctgccgtcaaagccttctgtgtagttcacttcaatggcaacatacggatgaggaaattcatcactgattttgctttttgaaatgacggtcacactcggtgtcgtaatgtccactttttgatttaaaagagtggacagcgccgtagccgagctgccgaacgaaatattcccgatttctccgatcgcatcgcgctcaagttcagacaagttcgcctcttgaggctgttctgtatcctctgactgactgcttgtgccgttaagaagagcatcgatttcatcttgagataatctattgttcatcttgttcacctcttatgtcgtgatctaaaatttgcactgcctgtcttcgattcacccggccggcctgccctaaaaacttcggtttgtttccgaccaatacagtaagaggatcagtcactgatttgtccagagttatacagtccccgacttccaaacttaaaaattcttctattgtcagttcagaagcgcccaagagagccacaacgggaatttgagccgtcatgatgcgcttttcaagcagcttcgtttcttcgggcttcgcttcattccggtctgattgcatccaataatgtacggaaagcttagggataatcggctcaagtacgacatggggaatacaaagattaatgacaccgctgatttcacctatctgtgtattgagagaaatgacaacgactgtttcatttggggaaaccatctgtacaaactgaggattcacttcaaattcagtcatttcagggtcaatatcagcaatcgattgccaagcttctttgtagttgcccagtgcattttcaaataagttagaaataatattcgtttcaatttccgtaaggctgtcagctttgttatgagtgatgccgatgcctcccatgacgcggtcaagcattgcgtatgcgatggtgggattaacctccatcatgattctgccttccatcggatgaacatcgaataaatttaaaatcgtcatgttcggtatggaacggataaattcttcatacggcacctggtcaactgagctgacggatatatgaatatacgttctgagcttggcggaaaagtgtgttgtgagaagcctcgcaaagttatcatgtatccgggttaaactgcgtatctgatctttcgagaatctgagagcccgtttaaaatcatatacctttacttttttctctttaacttcctttttcagctcttccgcatccgcctcacccgtggaaatggcggaaagcagtgcgtctatttcattttgggagagaacttctcctgacattttcttcacctccgtattctgtcaaatttgtttttattgcagattaaaggaggtaatgtacactttctgaacttttccttcttggagatagctgtttactttctcttttaatgattgtttaaacgcttctcttcctttatctccctcaatctctccggcgcttgtgtcagctaaaatggaaatgatgttgtctttcacctgaaaatcgcgtttttcaagttcttccttcgctttagccgagtcggtttcaagcttgatgccgatacggatgatgctgtcagactttaagtttgtcgtgatatcgtcgacagacacagtggctgcaacgacttcgtcaattgtcggctttttatctttgccggaatgtccgctgacgacaaaatatgctgccgttccgaggccggcgatgacaattaaaataatcagcaaaatgatgactaattttttcttcattcttcttcctctattccctgatccagtgaaaatatttgtatgctatggtaaaacgatatgacttttttgagaactgcttcttccggttctttcacaacgaactttttgccgttggacagtgtaatcgtcgtgtcggggaagcactcaatctgttcgataaacagcgcgttcagcgtaaaaggctggccgtttaaacgggtgacttgaatcatgcaatccggagaagcggcctaaccgcctctcctccctccttaccgtttcagattaaccagctcctgaaggatttcatctgaagtcgtaatgatttttgagtttgattggaaaccgcgctgagcaacgatcatttcggtaaattcatctgtcagatctacgtttgacatttcaagatagcctgccaaaagcttacccgttccgttttcgcccggagtggtgactgcgctcgcagctccggaacttaatgattctctgtaaaggttgcctccgattttttccagaccggcgctgttagggaacgtgaccagaccgatttgtccggcatcatgaaccgcatcccctgcatcagtgtatgtaacggttccgtctgcaccgatgctgtaatctttcgcatcagtcggaatattgattttgccgccgccgattttttcaaggtagtacccgtcagtcgtaacaaggttgccttgattgtcctttccgaaattccccgcacgtgtgtaaacgattcccgaacctgtattaatctgaaagtagccgtctccgtcaatggctaggtcggttttattctgtgtagcctgcggggcgccggttgaatgaacgacatcaatggaagaagtcgcggcacccaggccgatttgttttgaattggtcacgtttgaaccgccggcgactgtctggctgatcatatctttaaatgtaacgcggcttttcttaaatcccactgtgttgacgttggcgatgttattgccgattacatctagttttgtctgaaagtttttcatgccgctgataccggaatataatgaacgtaacatgttaaattccccctgggtttctttttatttagatgtttcgctgacggccgtgacattccacggactgacctctttgccattttcaagcacgagcacgtaattgccgtttgaatgcttgactgaattgactgggcttgtctgatccttcccgtcgctgtcgctgaatgtgacatttttgccgatccagttcacatacatcgtaaacggatcttgattttctacaaatttagtcatcgtcgtattcatattcatcatttgttccaatgaagaaaatgtcgccatctggctgatgaattctttgtcatcaaccggattgagcgggtcctggttttgaacctgtgtcattaagatcttcagaaattcgtctttccctaaattcgtactgctgtttactgcggaggtgctcttcgcgtttgaagtggttgaagcgcccgccgcggcataatccgagtttactgatgtcacctattcttcctccatttcattgagagaaagctcctccagcatatctccgaaatcgcctgactgctgcttgttcttctgctctctctgtccctgatgctgctgtttattgtgatcggccgtctgcccgtaaacaggctgctgatccccgccttgaagcgggactgtaaaacggtcgacctggaccgacatattcggaagcgactgtttcagctgaggaagatgctgttccagcagctctttcgcggactggctggatgcgattattttgctttgaaacatcccgttttcgtttgtcaccttaattgtgacaaatccgaggttctcgggattaagacgaatcgtaaagcttccggttgttttcccgaaaggcgtgtatttcatctgtttccagccgctgatgacctgatccgttaacggtttattttctgccggctgctgttcagctcctgcggacgcttgctgaatgccggcaaggcttctcgttcccgaaaacagtatatgtgcagacaatttgctgtcaggcgcctttgcgtgagaaaccgtgccgccgttttgctgttccgttttcccggctgactcttgggatgattcagatgattgagataacacaaaagctttcagctcagtttcagccatatcccattcctttgttcccttttgagaaaggcccgcaagctgctccgcgacgctttgaaagctcttcagctcagcggctgtcatggagtaaagtttagatgcagattcgtttttcggaaaaaatgtctgccgcaggtcttgaatcacgcggtccggaacaccttgttttttcaatgcctctaataaacgggcgccttcctggtaaaccgcctttgcctgcgtgctgtccggcagttcctgctgagatgtgaagagctggaatacggcttcttgaatgaaaagcaggcccttctcaagcgcatccttgacggaatccccgtcttttgcggaagaatccggctcattcgtttcaggcttcgccccatgctgttttcccgctaacatgtcttcaacggattcggcaagctgtttcaataaaggaagagctgtttcagccgtctgctttccttcaagagcttttaccgcctcaagcagctgtttaagctgcaattctttatcttccgggccggctttcagccaatcaccgattttcgatagggcatcattcagctctgcgtcacttgtttttgtttcatctccgggctgccggggagaagtgatttccgacaggagccagttctgaaatagacctaagctgtttacattcatcttcacattgctgttttgcgcagtctgcgtacgattacccgttaattcaagcagcttcaacttacatcactccttatttccgtcagcggatagtttttctgtatatttagccgcttgttcaggagtcattttcgtcaagatttcagcaagctgctttttacttaatccgtttaaaatatcgagggcttctttttctttcagctttacgataatgcttgccgctttaccgctgtccatacttttatagatgttgatcattttatcttttccggctgaatccgaagcgtcttttttcgtttcatccgtcttcgttttctgctgctgttcagcttcctgtttcagcgaacggattttctgattcagattatcgatttcggacttgcttgtatctaaatctttattcaaaatgttaatttcacttttttgttcctttatggtcttttcaagagaagccgttctgtcttccttctgcttttccgccgcgcttttcatttctttcgtttcgggaaccaattcttttaaaacaggcgttttagcggctgtttcctgaatcggcttcatcacatcaacgccggcagcccaaaggatgatgcttgcgacgatgatcagaaaaatcagcgggatcatgataaaaagcaggattgaaccgaactttccagatctcttttctttttcggccatttcattcgctcctaatgcccctgaatcataaactgcttgattgaaatgtcatccatttccctcatctctgcagctttgtcttcaagtgcgaacatattaaattgtttttcccgcattttttcaaatttctttacttcaatgtttttttcggtgagctgttcctgcttctcattcatttcatttcgtttcatgatgacaagcttttgataatgatagatggtgttctcaagattggaaacgaattgctgataatgtctcatttcctgaacgctcatcccgcatttcagctttgattctttgtctttttcgagcaattcttttttgctcatattttcatatagtttttcagccactgtctcaaattcagaaaccgattgtctgtattcagtcaatgtttggtctttttcattttcttttaattccagcagcttttgaaatctgaattggtacgccatgatgtttattcctcttttcctgtcagactcgtcaatgccgcaatgctgtcttccaattgagcaggttcttccgttccttgttttaaaaattgaataagctgcggataaaactgaatcgcttcatcaatttctcttgatgaccctcttttgtaagctccgatattaatgagatcttcagagttttgataagttgacagaagatcgcggaatttgttggccgcctctatgtgcgctgtgtctgaaatattagacatgaccctgctgatgcttttcaggatgttcacggccgggaactgtcctttgttggcaagcgcccgatcgagaacgatatgcccgtctaatattccgcgcaccgtatcggcaatcggttcgttcatgtcatctccgtcaacgagaaccgtataaaaagcggttatcgttccttgttcatttgcgcccgttctttccagcaaacggggcaaaatagcgaacacagaaggtgtatatccctttgttgtcggcggttctcccgctgccaggccgatttcccgctgagccatcgcgaccctcgtgacggagtccatcatgaacatcacattccggcctttatcgcggaaatactccgcaatggcggtggccgtatacgccgctttcaatcgcattaacgcaggctgatcagaggtcgcgactacgactatcgagcgtttcaggccttcttcgcctaaatccttctcgatgaattcacgcacctcgcgcccccgttcaccgacaagtgcgataatgtttaaatcagcttcagtctgcttcgcaatcattcccatcaaggtgctttttccgactccgcttccggcaaaaatcccgattctctgcccttttcctaccgtcagcagactgtcaatcgatctgacgccgacacccatcttttcccgtatcggcgggcgtttcatcgggtttggcggcggctgttccgtcgaaacgggggacaaacctttcggaagcgcccggccgtcaagaggttcgccgaacgcgtcgacaacttgtccgattaaacccgcccctactttgatgcggagcgactcgccagtggcctccacaatgctgcccggcgctatgctggccgcttccagataaggcattagcagaatgttttcatcctggaagcctacaacctcagctttaatcgcttttttcgcatggcctttcggataaatgagacaaacatctccgattgagctttcgggcccttttgattcaatcatcagcccgatgacccgtttaaccttgccgtagcgtttgtacggatccgctgtttcaattgagtctattaaatactgtgtcttcattgctccgctcccgcctcaagcgccgttaaaagcttttgctttaattgcatcagctgagtgtctatgcctgcatcaacacgtccgaacggagtttctatcgagcacgttcccttcgcggctttttcatcggcatataagcttaatctgcattctttgtataacagctgctgaatttcgtccatatgctgatgaaccgtctcataatattcagggtccacatagatggagatgtcatcataatcttttacttcggctactacctgtttgaccagcagaaggaaagcctctttatcgtcacttttttgccgccatacttttttagcgagcgcaacagaaagctcaataatttcttcctcagcgctttccagtttttcctcgactgattgtctggccatttccataacggcattggcccggctgatgagattggcatattctgcttgagcatcggcttttcccaatgccatgccttctttatatccttctgccttcgcttcttcaatcaatctttgtttttcttccgcccagcggtttttctcttcttcaatctgccgaagagtgtgatccaattgacttttcgcttcttcagacaccctgtcggcttcggccttggcaaaggccatgagtgcctccggattttcaggttcctcccggtctggctgggaatgtgttttcctgacttcctgcaaggatagcttgcgccgtttttgttcaggagaaaatgatgtttgctgtttaatgatattagacaataatatcgtctcctccgcctcgcgcgattacaatttctccggcttcttccagcttgcggacgacgcccacgattcttgattgcgcctcttccacatcacgcaaacgcacaggccccataatttccatttcctctttaaatgtttcaaccatacgctgtgacatattgctgaagacaatctctttgacttcctcgctcgcaaccttcaatgaaagcaggaggtcgtcgttttcaacatctctgatcacgcgctgaatcgcacggttatcaagggtgacaatatcttcaaagacaaacatccgttttttgatttcatccgccaattcaggatcttggatttctaatgaatcaaggatcgttttttccgttcctctgtctacgccgtttaacacttcaacaacggcttctatgccgccggtctgcgtataatcctgcgtaaaggaggaggacagcttttgttcaaggacccgctccacttcatttatgatttcaggagacgttctgtccataaccgcaatccttcttgccacctcagcctgaacgtccgggttcagctcagacaaaatctgtccggcctgcaccgggtcaaggtaggataaaatcagcgccatcgtttgcggatgttcctgctgaatgaaatttaaaatctgttcgggctccgcttttctcgcaaaatcaaacggctttacctgcaaagaagaggtgagcctgtttaaaatgcttaccgctttgtcttctccgagcgctttttcaagcacttggcgggcgtaatttaaaccgccttgtgaaatatagtcctgagcgattgcgatattatgaaattcttcaatgatttcatcttttctttgatgatcgacgcttctgactcccgaaatctcgagagtcaacctttcaatttcttcttcagacaaatgcttgtacacagaagctgatacatcaaggcctaaggaaatcatgaggatggctgctttttgttttcctgtaagcttgttctgatcacgtttcgccattttccattccccctaatcctcgtccagccagcttcgaagcaatttagcaaagtcttccggtttttctttagccattttttcaagctgttttcgtctgactgtttcttccgtttcaattttctcttcgttgatatcaggcaatcgaaccggctccggcggtgtttcatattcatattcttcgtattcatcctcttgtgagcgtttctttctgatgaggagaatgataagcagaataatggccgcaagcagtacgccgcctgtaatatatacccagatcggaagacctgaagattgtgccgaatctgtgttcaggcttgtttttccgtcaaacggctgaacggatacaacgattttattgttgatatcattgtctgtcaggttttgattttgcgtttcgtttttatcaagagacgttctgacgaccgttcctaaaatcttctgtatatcagcctgtctctgtgccgataaggaagcggcatttttcggattaggcggctccaccatgacctgaatgcctaaatcacgcactttatacgggctttccgcgatttctttatgaatgcggttgacttcatagttgattttattgctgcttttttcgtagtccccgctgtttgaaccgccgtttgtctcggcatagttcgcggtgtcattgcttcccgttccggccgtgccgccgttggccgcgccatcgcctttatacgtttccgcgactttttcggcgcttaccgctatgccttccatgttatctttatcgacaggttcgacagtgtcttcagtgcgtttttccttcgtgaagtcaatatccgccgttacagaaacaacgaccttatcctgccccatcattgtgccgagcagtgactgaacatgtttttgaatgtccttttcgacctgcgacttaataccttgctgagatgcataactgtcagaaacggaccctgcaccgctgtcacttttgtcataatatgtagaattttgatccattatgacgatattatcttcttttaagttcggaacacttttagaaacgagatggtacagcccgttgatctggttttgatcaagcgagtagcccggtttcatctgcaaaacgatggatgcggacgctgccggctgatcttcaccgacgaacacggcttctttcggcatattgatcatgaccttcgagcttttaataccgtccatttcatttatcaggtttgacaattcggtctgagtcgcctcaacctttaaaacgtcaaactcattatctgtcaggccgaagcccgcattttgtccgaaaaacgaataatcaattgatcccgttttcggcaggccttccgcggcaagctggactttaagcgaatccacttggctctcaggaacctttatgaccgtgccgccgtcagcaagttcagaagacacctttttcgtatcgagctcttctttaatcttccccgcttcttccgcggacaaatctttataaagaggcaccatcttttcagacgaagtaaaaataataacgacgatgagtaaaataatgaatgcggccaagccgcttaccatgagtatcttctgtgtttttgatctgttgttccaaaacgctgccgttttggttttcatttgcattagagtacgattcatgttaacccccggtcattccagtcattctcttcaatctgaccactacatctgcattctcatgatttcctgataggcttccacggctttattgcggaattcggtagcggccgtcagagaaatatttgctttttgggcagcgatcatgacctcgtcaaggtttacatcctttcctgcagccagttcgttcgttatttggtcagattttacttgtgactcatttaacgaatcaatagagttttttaaaagctccgaaaagcttgtttggtttgaagaatcagttttttgagtttggtttaattgattcgttacgttttgagtgttttgggtttgttgaagctgaaaaggagtaatagcgttaaccacttacatcaccttactttccgatttctaaagcctttaaaagcatgcctttggaggcgtttaatgcagttacgtttgcttcatatgatctcgtgctgctgacaagatccaccatttcttttaatgggtctacatttggtttttgtacatatccgtctttattcgcatcaggattctccggatcataaacgagattaaaagcggacgggtcttccgtaacgccagatacctttacgccatttcccgcgcttcctgttccgttcatcttggaatgtaaaagggacgaaaatgattcgcctccggattggagagataccagctttcttctgtaaggcacccattcgccatttacctgcttcgctctcgttgtgtccatattggccaggttggacgatacgacgtccatccggacacgctgtgcagttaaagcggaacccgaaatatttaagctttgaaagccactcattattttcctcctgtcaagacggttttcagagaattgaatttgccgctcattctttcaaccaaagcctgataattaatttggttttcggctaaatctgtcatttctttgtcgatatcgacattgtttccgttttgctggtacgatgtatcactgctggacacgatagaataatcgtcccttgaacccgtaaagtcaacgtgccgatagtcggtttttaccgcctcaagattggatgtttcctgatctaacaaatttcggaaagagactttttttgccttatagttcggtgtatctatattggcgatgttattagttaagactttttgcttaatgtccgctctccccaaggcattctcaagattttgtatagttccagaaaataagtccaaatccacttacctccatttcagatatttttctcctaaaaatccttgtcgagaattgtaaaaccatatgcttattgtaagaaataacaggcttaaagtctatgaagttaggctaaaaaaaagtgctcaattatatctattttgcatgtaggtattaagtcctagagtatttggactacaagtatttgtttaatataagactgaaaatagcagaatttctgtatcttcctccttttttcacacagcaagatggattatctcagatcagcttccaataagcaactttaaactgcaacttttcacctattgtccataaaaaaagcaggacccccattttcagggatcctgcttttgtcttaatgagatttaaggttttccaattcaataaggaatttgttgttcagaactttaatgtacgtccccttcatacccagagatctggattcaatgacgcctgcgctttccagctttctcagcgcgttaacgattactgaacgcgtaatgccgacacggtctgcaatcttacttgccacgagcaagccttcgtttccgtcaagctcttcaaagatatgctcaatcgcttcaagttcactgtaagacagagaactgatcgccatttgaacaaccgctttgcttcgcgcctcttcttcgatttcttccgctttttctcttaaaatctccattcctacaacggttgctccgtattcagcaagaatgagatcatcatcttcaaattgatcctgcagacgggacagaatcagcgtgcccagtctctctcctccgccgatgatcggcacgatcgttgttaagcccgcttggaacaggtctctgttttccacaggaaatgccgtgtattcgctgttgatatcaaggtttgaagacgtctccggaacattgaacagatttctcgtgtactcttccgggaactggcggtcttcaagcatttttttcatgcggtcattttcaatctgctgattaatagagtagcccaaaagctttcctctgcggctgacgacgaaaatattagaatcaatgacgtcacgaagcgtttcagccatttctttaaagtttacgggtttgcctgccgcagcctgcagcatgctgttaataattcgtgttttttgtagtaaagccatgataaataatcctcctagaattcctcttattaaattttcacaatataaattgacttagatctttgttgtttgcaatcgttccgagcttttcttcaacatattgcggcgtgatggcgactttttccatcgtcacgtccggcgcttcaaacgacaggtcttccaagagacgttccaatatcgtgtgaagccttctcgctccgatgttgtccgtatcctgattcacatgataagccacttcggcgatcttacgaatagcttcgtcagaaaattcaagagatataccttctgtctgcaataaagcctgatattgttttaacagcgcgttatcgggttcgacgagaatcttcacaaaatcatccaccgtcagcttgctcaattctacacgaatcggaaagcggccctgcagctccggaatcagatcagacggtttggccatatggaatgccccggctgcgataaacagcacgtgatctgttttgacggagccgtatttcgtgacgacggtagatccttcgacaatcggaaggatatctctttgaacgccttctctcgatacatctgctgaggaagaagcccctccgttttttgcaattttatctatttcgtcaataaagataatgccgccctcttcagctcttaacacggcctcttggccgacttcatccatatcgattaatttgcctgcctcttcattggtcagaaccttccttgcttctctgaccgtcattttgcggcgttttttcttttttggcatcagattgctcagcgcatcctgcatattcatgcccatctgctccatcccggagccttgcagcatgtcaaacatcgacggctgctgctcttccacctctacggagacgtaatggtcttcgagctctcccaatgcgagctgatgcgccatgcgttttcttttttcttcaaggcttgcttcttcctgctgatcggcttcatcatcatttgccgtctgacttcctccgaaaagcatttcaaacggatttttcacacccgcttgttttttctttcccggaacgagaagccgcacgatacgtttgtttgcattttcttcagcctgttctttcacttcgctgattttttcttctttaatgagccgcacggatgtctcaacgaggtctctgaccattgattcgacatctctgcctacatagccgacttctgtaaattttgtcgcttcaatttttataaatggcgcaccggtaagcttggcgatccgtctggcgatctctgttttccccaccccggtcgggcccatcatcaggatgtttttgggaacgatctcgtctctcagtttttcatcaagaagacttctgcgatagcggtttcttaatgccacggcgacagcttttttcgcatcctgctgtcctacaatgtattgatccaaccgatctacgatttgtctcggtgttaacggtttgttttccatgcgcctcaagtcctttctattcaagttcttccaaaatgatctgatcgtttgtgtacacacaaatctcgcctgcgattttcaaagcggcttttgcaatatctttggcggacagattctctccggcataggttttcagcgctcttcctgctgacagggcgtagtttccgccggagccgattgccaaaattccgtcatccggctcaatcacttcacctgttcccgatacgagaagcaaggtatcctggttcatgacaatcagcatggcttccagcttgcgcagcactttatcgctgcgccattctttcgcaagctcaaccgacgcacgttttaaattgccgttgtattcttcaagcttcgcctcaaacatttcaaaaagtgtgaaagcgtctgcaacagatcccgcaaatccggccagaacctttccgttaaacagctttctcacttttctcgcggtatgtttcatgactacagcctgaccgaatgtgacctggccgtctcctgacatagcgcttttcccgttatgctggacggcaaaaatcgttgtcgcatgaaaagatgacatgagaagggcctccttttaattttctttaaaagctctcgggtggtgggacatatatgtgtttctcagcatttccttcgatacatgcgtgtatatctgcgtagaagacagattggaatggcccaaaagctcctggacgcttcttaaatcagccccttcattcagcagatgagtcgcaaacgtgtgccgaagcatatgcgggtgtatatgtaaagtgccggatgctttttttacaagcccgcttaaaatataccggattcctctggcggtcagcgggccgcctctttgattgacaaacagcacatcatgaggctcttttgctttttcaagcaggcactgccttccgctgttgatatacagctccagcgcatcacgggcatatgagccgaacgggatatagcgctgcttcttgcctttcccgtgaacgagcaccgtatccatgaacaggtcaagatcgccgacagtgagcgtacagcactcactgaccctcattccggtcgcataaagaagctcaagcagggcctgatcgcgcatccctgacggctgacttctgtctgagacagcgaatagttcctcaagttctttttcataaagaaacttcggaatccgtttctcttgtttcggcagatgaacaagctgaaacggattctcttcaacaagcttttccctcattaaaaatttatagaagcttctcaaagctgaaattttcttgctgattgttcttcttgacaggcctttttcataagcctctgtcaaaaatattctcacatcatgatatgcagcttctttcattccatttatattttgagcatgcagaaacatcccaaattcttcaatcgaattaacataattcacaatagtatattgtgaataatttttttcaatttgtaaatattcaacgaataactttaaaaaaaagttaacattctcagtcattatgaagacctccctctccgaagggcttttaaatggtatcatataatgcatcgaagttgcaatgaaaagctatatcgttttcgaaatagtttgaatagtctcaattgcgcgtttagcgtattcttcatttcgttcttttttgtttttaatttttacaggcaattcttttaagaggccgaagtttgcattcatcggctggaagttcttctgatttgtcgtcgtaatgtagtgagccatgcttccgatcgccgtctcctgcgggaatgtcacaagatcctgaccgagcacaagtttggcggcattgattcccgctacaagacctgaagcggcagattcaacataaccctctacaccggtcatttggcccgcgaaaaacagatcgttccgctgtttaaattgatatgtcgggttcaaaaggctcggcgagttgataaatgtgtttctgtgcatgacgccgtatctgacgatatcaacattttcaaggccggggatcagtttcagcacttctttttgatctccccattttaaatgtgtctgaaaacctacaatattataaagcgttcccgccgcgtcatcctgtctgagctgaacgactgcataagggcgcttgcctgttttcggatcttccagtccgaccggtttcatcggtccgaacagcatcgttttcttgcctcttttcgccatgacttcaatcggcatgcagccttcaaagaagatttctttctcgaattcttttaaaggaaccgtctcagccgtcgtcaatgcttcatagaaacggtcaaactcttcctctgtcatcgggcagtttaagtatgccgcttctcccttgtcataacgggattttaagtacactttatccatatcaaggctgtctttttcgacaatcggcgccgccgcgtcataaaaatacagatactcttctcccgtgagctctttcagctgctgtgaaagcgattctgatgtaagcggtccggtcgcgataaccgtcgggccttccggaatctctgttacttcctcagtaagaaccgttacgttcggatggtttttcacgagatccgtcacgctttgcgcaaattcatggcggtcaacggcaagcgctccccctgccggaaccgagcatttatcagcagattgaatgattgctgagtcaagcgcccgcatttcttcttttaatacgcctaccgcattggcgagtgtatttgaacggagggagttgctgcataccagttcagcgaatttatcagtatgatgggctgccgtctgcctgacgggccgcatttcgtatagttttacttgaattcctcgttttgcaagctgccatgccgcttcacttccggcaaggcctgctccgattacattaactgtttgctggttcatttcttttcatctcctgttgtttgtcccttccacacaaagaaggtgagcaaggctctgctcaccgctacttctgtggttcttccttataatcgcattcgacgcattggacttgtatgccttttttaagctttttctctacgagcatattttcacatttcgggcattttcgttcaatcggtttgtcccaagatacgaagtcgcattcaggataacggtcacagccgtaaaagacgcgtttcttttttgattttcgttcgacaatatttccttcatggcacttaggacattttacgccgatttgtttaacaatcggttttgtattccggcagtcagggaagttggaacacgccataaatttaccgtatcggcccattttataaaccatccgggagccgcataattcacaatcttcatctgcgtattcaggttcaatttccacttctttcatttcagcttccgcttttttcacgcgtttttcgaaatcggtatagaagctgtcaatgatttgaacccattctgtctcgccatcttcaacatggtcaaggtccctttccattttagccgtgaattcaacgttgatgatttccgggaaaaactccatgataagatccagcacgatctgcccaagctcagtcggcacaaaccgtttattgtctaatcccacgtaaccgcggcgctggatggtgtcaagagtcggcgcatatgtcgaaggacggccgatccccagttcttcaagcgttttaaccaggcgcgcctctgtgtaacgcggaggcggctgagtaaagtgctgctcaggctcaatatcttttgataaaaccgtgtctccctctttaaggtccggaagcatgcggtctttttcttccagctgatcgtctttaccctctacatagactttcatgaagccggcgaatttgactttacttccgtttgcccggaatgtcaatccgttattgctgagatcgacgctcatcgtatcaagtacggcaggcgccatctggcttgcaacaaaacgctcccaaatcagcttgtatagtctgagctggtctcttccaagcaccgcttttaagtcggcaggttttctgagcaccgaagtcgggcggatcgcttcgtgggcatcttgagcgttttcatttttctttgccggtttccgttttcccgctaagtactcttttccgtatgcctgatcaataaaagctgacgcctcttcaacggctgtattggaaatccgcgttgagtccgttctcatatacgtgatgagtccgactgtcccttctttgccgagatcaattccttcatataattgctgagcgatcatcatcgttttcttcgctctgaaattcagcttcctggcagcctcctgctgcagagttgacgttgtaaacggcagagcgggatttcgtttgcgctcttttttcgtcaccttgtcaactgtatacttattgcctttcagctgagcaaggacggcttttacgtcttcttcgctttttaaaggaagctttttgccgtttttcccgaaaaatccggcttcaaacgtctcttttccctttaaaaatgagccggtaatcgtccagtactcttcaggtttaaagtcattgatttccttttcccggtcgatgatcagccggagcgcaacggattgaacacggcccgcactgaggcctttttttacttttttccaaagaatcgggctgattttgtatccgacgagtctgtctagtatgcggcgcgcctgctgcgcatcgacaagatccatgttaatcatgcgcggatgtttaaatgattctttaatggcgtctttcgttatttcattaaagacgacccggcagtccgagctgagatccagatcaaggctgtgtgcgagatgccatgcaatcgcttctccttctctgtcggggtcggccgcgagatagactttttttgctttctttgccgctgtttttaattcttttaaaacagggccttttccgcggatcgtaatatatttcggttcaaagttctgttcgatgtcaactcccatttgacttttcggaagatcccggacatgtcccattgaagctttgactttatatttcttccctaaataacgttcaatcgttttcgcctttgccggcgattccacgatgactagataatcagacattttcatccccctcaagaggtgttctctctcttttcaagtatcaattcattttagagctgcctttttatggctttcaacatttcattctttatgatgaacgtcattttatacatgaaaataatatgcaactttaaatcctcactattattaaatattacaataccgtttgtcaaacgatatttcaaaagggttccgtatactgaacgcatcgggcggtcagctctccgtcaatatcctctgcgcataatacagctttcgccccttcttgaatgagttttataggtcctccggaatatggattaaatatggaacccggaacggcaaatacctctctgccttgatcgagggcctggtaagctgtgattaatgaaccgcttttttcttttccctgcacgaccacaattccttcacttagtccgctgattatgcggtttctcatcggaaagtgccattttttcggctttgtttcaggaggatgttctgagagtaggagatggtgttcagccatgtattctgctaacaggagattttcccggggatagatgtgatggaatccgccggctatcacgccgatcgtaagcccttttgccctgatgctcgccttatgagacaaaccgtctataccggatgcaagcccgcttacaatgacccagcctttttttgagagttcggcggaaagatgcccagccgcttttattccgtcttccgtcggtttccgcgttcctacaatcccgatttttctgcctttttcaagaagcggtgtgttcccttttgcatacaagacagccggcggatcataaatcgctttaagccatgttgggtagcagcttgatgaaatcggaataacagtaatgccttcgcggcggtaatcggacagaacttcatcaagttccggatccttgcgctctatttcccgaaaaattgcttccggggctgttttcccctctgataaaacagttaatggatgcggatccgaaaaaaaagacagagagtgatcagctttccaccattttaatagaagagacggggaaatgatttgattaatactgcagaccattaaacagcgcgatgcttgatccaaatctggcaacctcctcttttttcagcaaaaacaggaacagccgttacggctgcccctgcttcgatcagtgcgttttgcacgtttcaaataagcctttttcttttaacaccttaatcagcgtttcacccattacagaaggggtttccgcgacttcaattccgcaggcgttcatcgttttgactttttcttctgccgtgccttttcctccggagatgatggcgcccgcatggcccatgcgttttcccggaggcgcggttttaccgccgataaagccgacaacaggcttcgtcatgttcgctttcacccactcagccgcttcttcttcagctgtgccgccgatttctccgatcatgatgacggcatgtgtttcaggatcttcattgaacgcttttaacacgtcaataaagttcgtgccgttgaccggatcgccgccgattcctacagcggtagactggcctacgccggcttctgaaagctgatggacggcctcgtatgtcaatgttcctgaacgggatacaacgcctacatgaccctttttatgaatgtatcccggcataatgccgatcttgcattcttcaggtgtaataacacccgggcagttcggccctattaatctcgttttcttgccttccataaagcgcttcactttcaccatgtccaaaaccggaatgtgctcagtgatacaaatgacaagatcaatttccgcgtcaaccgcttccataattgcgtccgccgcaaacggagccggcacgtaaatgactgacgcatcagcgcccgttgtatgaaccgcttctgcgaccgtattgaataccggtacgccttccgcttccgttccgccttttccaggtgttacaccgccaacgatattcgtgccgtattccagcatctgctttgtatgaaataaagcggtagaacctgtaatcccctgtacaataactcttgtatctttattgataaaaacactcattatctggtcccctgcctttcattctttcctaaactaaggatacgattttctgtgcgccgtctgccattgattccgcagatgtgatgtttaagcctgattcattcaggattttctttcctaaatctacgtttgtcccttcaaggcgcacgaccagcggcaatgtcaatccgacttgtctcgtcgcttcaacaacgccctcggcgatgacatcacacttcatgatgcctccgaaaatattaacgaaaattccttttacgttttgatcggaaagaatgattttaaaagcttccgtcactttttctgcggttgcgccgcccccgacatcaaggaagtttgcaggttctccgccgtagtgtttaatgatatccattgtagacattgcaagacccgcgccgtttaccatacagccgatatttccatcaagggaaatgtagcttaaatcgtattttgacgcttcgatttctttcggatcttcttcatctaaatctctgtattccataatgtctttttgtctgtataacgcattgctgtcgaagttcagcttagcatccagcgccatgacgtttccgtcccccgtaacgacgagagggttgatctcggcgatggagcagtccttctcaacaaatgctttatataaaccgagcataaatttagcggctttgccgacaagctctttcgggatgttaattgcgaatgcaatttcccttgcctgatagccctgaaggccgacagccggatcaattaccgcttttttaattttttcaggtgttttttccgctacttcttcaatctccgttccgccttcttcagacgccattaaaacgattcttgaagtagcgcggtcaagtacaagcccgacatagtattcctttttaatatcgcagccttcttcaataagtaagcgttttattacttgtccgtccggacccgtttgatgtgtgacgagcgtcttgcctaacagttcttcggcatactctttcacttcatcttttgtttttgcaatctttaccccaccagctttgccgcggccgccagcatggatttgcgcctttacgacataaaccgagcttgacaggctctctgctttttcaactgcttcctctgctgtaaaagccactttaccttcaggaacagacaccccgtattttctgaggacttcttttccctggtactcatggatattcatttcccatcctcctaacttatgtagcaaaactaaaaatagactgcgctttcattctatataatactggaagaattgtctagggttcaaaacaaaatctttatatccttccaaacattctaacttttattttattgaaaatataaatttaaacggagtccgggaaatgaatggtccttatttttcgtttttcagggttttgtccagtctgtaaacaaatgaaaaaatttcggcaacggtttcatagagcgcctccggtatgtgatcgtcaaccgtcaaatggcgcattaattcgacaagggttctgtcttcctgaatggggaccccagccttctcagcttcttttataatattttccgccacgtgccccctgcctgttgcgacaaccttcggggcttggtctttctgccggtcgtaatgcagggcgacagctcttcttaacggcgtttgctctttcatattttcacatccacttttcttccgccgtctttttctataaactcttccacaagagcgctctggtctttcgggcgccgttttttagacgtgacgcctgacaggctgaagcccgtttcttttacggcttcttttaaagccggtacgagagggtcgatggccgcctgaagctcaaaatcagtctcaaccgtaatggtcattacattttgctgaatcacgcagtccacaacggtttcttgcagtgtttcaagatgcagcaaaaacaggagcctgcaatgtgacggatcgagttttccgtccggcttcttccgtcctttaaagagaactgtgatgtcattctcatacgcggacgctcccagcggaaatgacagcaccatctgcgtaaaagaagggttatgctgctcaataaacagctggccgtttaatttatgaataagcggttccgcctcttgtttaacggattggggcgcttcttgaagcgtccggacggcttggagggccgttttcagcgcttgtttctccggctgcggagatacgcctttttcaagcgctgtaatgaatgataattcatcacgcgtgcccaatccttttttgattttctgcaaaaggcttaatacatcatgtttttccgcatatttcaattcggtgagctgaacggctttttcgaaaacagccgcctcctgttctgtcagatgtgctttttgaagaacaggtgctgttttaaatgttttttcttgagaaatgaaagccttaatgatctccgccgttacttttacggggcggttttcagttttttctgccgatgtcattaatttctctataatctgttttgccgttttttcaggaagtttttgatctgtccgcgcactcggaggagaaggttggcttgagactgcctttccgttttcacgagtctctcggacaaatggtgattgttttgattccgtccgttcttcttcatccatcagcccggtttctgggatcggcatgcgtgcagcctcggcaagcttcttcaagagacgttctgcatgaagatccgtttccgcgtttaatacgtcagaaaccgcctctttgagcacagacagctcttttgccgattgcggtgcctgattgattgcctgaagcagtcctgagaggaggcgccgggtcggaaccggatatttaacggcatgaatggctgacaagacttccggatgtgcgggcagttcccgtttcagcgcaaatacgattgtttccgccgcttttttcaattcggcggccggaagcgattcagcccagcggacgcaggctttgaggctgttttccgtcatcggcagcttctgctgcataaacgtttcggcaatctgcagagacacagggcccggtttgacggaaagagcgtttaacagtctacccgccgcttcctgaacggttttcgggcttccttcgaattggtcgatgacatgaagccggcccgttttttccgccggctgtttgtcataagaaaaccagtaatacgcctgcggacgaagggcggtttcaagttttccctgcatcgtccggccgccgatctggataagagcgctttgatcgtccagcaaacggagaaccttccctaacagcagcctttgagtaccgctgtctttaccgccgtcctgccggtccggagggatttccgccgtcagctgtctgaaagccgcttggatttcgccgctaatgttcatgtcttaagcctcttttctaacaataagattgaacgggagcgaacgtttttcggtgaatagttgtcggtccgtatgcctgaagagcttcaagatgttctttcgttccgtagcctttatttttttcaaagccgtacatggggtaagttttggcgtactcagccatgagacggtcccgcgttacttttgctatgcaggctccggcggcaattgacacgcttttggcatccccttttataactgatgactgcggaatgtcaagcggaagggtcatggcatcaacaagcagataatcaggtgtttccgttaaagcattgacggcttttaccatcgccagtctcgcggcctcataaatgttgatccggtcaatgacgtccgcatggacaatgccgactcctacagccgccgcttcttccgtgatccggctgtaatactcctcgagcttcttttccgacaatttcttcgagtccgtgagaccgagaatctcgcattctgccggcaaaatgacggcgccggcgacaaccggtccggcaagcggccctcttccggcttcgtcaacacccgcaatcaggcggaagccctttttggatgacagtctttcgtatgccgtcatgtccagccattgctctttaagagctttttccttcgcatgctttttcagccattgctctaaaagcgtctgtacgctttttctcgggtctttctcacattgggcaaggaaggggtcgctttcgtccctgatctcttgcaggcgttcttttacgctttttacggttaatgtattcacgttctcttctcccttacattatgtatatcggtattctgcggaaaaaataaagacccgcatcgctgcgcgtctttattctgatggtgcttcaaatgaaagcctgccgaatttttccgtccggatgtcccgaatgataacttccgttgttttatcatagtcaaccattccgccgcccatcaaacagccgcgtttttcaccgatcgcgtcgaaaagagcggcgatatcctcagggatttcctgaagtccgtagcgctccttcaaacggtcgggataatgctcttccagaaagcgcagcccgaaaacagccacatcctgcaggttgataatcgtatctttaatcgccccggtgatcgccaggcgcaagccgacaagctcatcttcaaatttaggccataaaattcccggtgtatcgagcagctctaattccttgcctacctttacccactgctgtgaagtggtaatgccgggcctgtctcccgtcttggcaatgttttttttggccagccggttaatgagcgtagacttgccgacattcggaatgccgatgattaatgcgcggattgctctcggcctaacaccttttgctttcattttatcgaacttatccttcagcagctctttcgaggacggcacgatttgatgcagtccctgcccgttaacggagtttattgaaagagagggaatgccctgttcctgaaagtggtccttccactgggcagtcacagccgcatccgccttatcggctttatttaaaagcataatgcgcggcttattttttaaaatctcctcaatcatcggatttctcgatgacatcgggattctcgcatccaccaattcgtatacgatatcaattaatttcagtttttctgttacttcccgtctcgctttagccatatggcccgggaaccattgaatggtcatgtgacttcgacacctgccttatttaccggaaccggatgttccgatgatctcttatgtattttacgttgcttgttccgcttttacaaatttcatataaaaaaagagcctgttacgggtaacaagctcttttcgttcgttatcattatcgtctgatttctttaatacgagccgcttttccgcgaagttcacgcaggtagtaaagcttagcgcgacgtactttaccgtaacgtacaacttcgattttcgcgatttttggtgtgtgtacagggaatgtacgttcaacgccaacaccgtaagaaatcttacgaactgtgaacgtttcgctgattccaccaccacgacgcttgatcacaacaccttcgaagatctggatacgctcacggttaccctcaacaacttttacgtgtacacgtaaagtgtcaccaggacggaacgcaggaagatcagtgcgaagctgttcttttgtgatatcttgaattagtttttgcatcgttttcaactccttccaacagatgctcttggccacaactgcaaggcacagcggaacatcgttttcaagcttctgaaggataagcctccttaagccacaagtagtatcttatcatatcttcatcacctgcgcaatagaatctattcgttttcccactcggaaatccattttctttgctcatcagtgagaggatagttttcaagaagatccggacgtcttaaaaaggttcttctgattgattctttattgcgccattcttgtattttggcatggttgccggacaaaagggtctcaggcacttttaagcctttataatcggctggcctcgtatagtgaggatgctctaaaagccccgtgctgaaggaatcctccacgtgggatgcttcttttccgaggacgcccggcaaaagcctgacaacgctgtcggcaatcatcatggcagggagctctcccccggtcagcacaaaatccccgatggagatttcatcagtgacaagatgttcccggatccgttcatcatacccttcataatgcccgcaaataaacatgagatgttcctcttccgccagctcctcggctttcttctgcgtataacgctcaccttgcgggcagacgagaataatgcgcggcttggcgtccgtaccggctgtcagcttttcaaccgcatcaaatacgggctgcggctttaacaccatcccggctcccccgccgtacgggtaatcatcaaccgtttggtgtttattatccgaaaaagcccggaaattgatgacgtcaaaacggacagcctctttttcctgtgctttttgcagaatggatgagccgagcaccccttgaaacatttcgggaaacagtgttaaaaagtcgattttcattcgtctattaacccttccattacatgaatcttaattttcttctcatttatattaatatccttcaccacagaagctatatacggaatgagcgcatcttttttgccttttcttgcaaccacccatacgtcattagccccgggcgtcaagatttccttcactgtgccgatcagttccccgtcttctgacacaacctcgcagccgatgatttcatgaaaataaaattcatcttcttcaagctctcccaagtcttcttcaggaactttgatcaccatgtttcttaggtgttcgacttcattgagactcggcatttctttgaattgcagcaggtgaaactgcttgtgaagcctgtgggcgctgaccgttactttgattggctccgcagccccttccgcaaacaaatagagcgtattgccgggcttgtaccgttcttcggcaaagtccgttttagaaatgacccgcacttcgcctttaatgccgtgggtatttacaattttgcctacattaaaccatctgtttgtcatattatcacctcgggcggatttcaattactaccccgtcttttatgacgatggtatttgccgctgttttttcatgccagttatcaccgacgttgattgaaagcagcgcatcgatctccttttccttcacttcgcttccaagcgggagcgactctgtctggcttatttggaaatcaatcattttgattttatcttgtcttttttcaatggcttttttaaaagattccgctacatcgggattctgctgatctttttcatgttttctaagctgaaaatagagctggctgcattctcgttcaagcgtttgctttttttctgcaaaagaggccaaaagcttttccttgctttgctcggtcagaacctgcataacggttaccctgtgaataatctgcataggaccagactccccactcttccaacatatttctgttcatttgccttttttacgtgtaaaaaaaggggaggtgccggccctctccctttttcagtcaaatatttcaaattgaactttcttagaagactgtgcgccagctgcaaaaacgacggttcgaatcgctcttgcagtccggccttgctttccgataatcttaccggtatccgacttattgacagataagcgtagcgcaatcttttgatcagtctcttcctttgtgaccgttatgtcttccggatggtcgacaagcggagccacaatgctgacaatcaaatcttccaagttctgatcagtcattacttgccttgtttagcgttgtggaatttttccataattccttggcttgagaacaagttgcggactgtatcagaaggtttagctcctgtttgaagccatttaagagcaagctcttcattgattttcacttcagccggctttgcaaccgggttgtatgtgccgactgtttcgatgaaacggccgtcacgcggtgaacgagaatctgctacaacaatacgatagaaaggagatttttttgctcccatacgttttaaacgaatttttactgccattttactagcacctccgaaaatatttcaacaagatagtatattaacaatgataaaagtgtttgtaaagtgttttttcttaacaacggttttatcatgtataaccgattacataaaaggtaatttaaagccttttttcttcccttttgacatgttggtcatctgcttcatcatttttttcatttcctcaaactgctttaaaagacggttgacttcctgaacggatgttccgcttcctttggcaatccgcttccgccggctggcgttaataatatccggctgttctttttcaagaacagtcattgatttaatgatcgcttccacatgattcagctgtttttcatcgacttggatgttttttaagcctttcattttgcctgctccgggcatcatttgcagcagttcgtcaagaggccccatgtttcggacctggccgagctgctccagaaaatcatccaatgtgaagctcatcgttctcattttctgctcaagctctttggctttgtcttcatcaacggtcgcctgagctttttcaatcagcgtcagcacgtcacccattccgagaatccgggatgccatccgttcaggatggaacgcttcaagagcatcgagcttttctcccattccggcgaatttaatcggcgtttcggtgaccgcgcggatagaaagcgccgcacctccgcgggtatccccgtcaagctttgttaaaatgacgcccgttaaaccgagctggtcattaaagcttttggcgacgtttaccgcatcctgaccggtcattgagtcgacgacaaggaaaatttcctcaggatttgcgacttcctttacgccggagagctcatccatcagttcatgatcgatgtgcagccgtccggcggtatctaaaatcacataatcatgatgctcttccttcgctttttcaatcgcctgtctggcaatttccaccgggctgacctgatcgccaagcgaaaagaccggcatatcaagctgtttccccagtgtttccagctgtttaatcgcggcggggcggtaaatatccgcagccacgagcagcggtttgcggttatgttttttgcgcagcaggttggcaagcttccccgtggttgtcgttttaccggcaccttggagcccgaccatcataataacggtcggcgggcgtttggcggcggcaattttgctttcttcgccgcccatcagctcggtaagctcttcttttacgactttaataacctgctgaccgggtgtcagactctgcatgacgtcctgcccgacagcccgttcacttacttttttcacaaaatcctttacgactttaaagttaacgtcagcctcaagaagcgcaagacggacttcacgcatcatctcttttacgtcttgttcgctgacttttccttttccgcggatttttgaaatcgtcttttgcagtcggtcggctaatccttcaaatgccattgtttgccgcctcctaatctaatttctcaagcgcttcaatcagagccgtcattttttcctcttcctgcaagccggaagcaagctctttcagctttgtaaacatttctttacgctcctgaaactttttaaaaaggagcagtttttcttcatattgttcaagcatcgcttcagtccgtttgatgttatcgtaaacggcttgccttgaaacgtcatactcttcggctatttcaccaagggagaaatcgtccagataataaagcgacatatagctcttttgttttgacgtcagcaacgactgatagaagtcaaacaaatagttcattctcgtcgttttttcgagcgacatttgagctctcccctttgttaagtcaaatccctttacaaaaacttagtttacatggtttcagagcgtgtgtcaagtttttatcttgtcaaagcaggatgctctttttacataataagtgttttcaaaaaaattcatacagaccgtcgttaaaatactcgaattcttgttttgatacacgatagcggcaatagccttcgtaaaaagcattgagacatgattcatttgtgacaaaacgactgatcgctaatgattcatcataacgcggatctcccgccgatattcccgcagcatcgataaacagatagacctctccgtctctcaccagcacattatcagtcgtgcagtcaccgtgaatcattgtctgctgaacaggaacaggcctgtacctgtccaattccttcaaaagctctgcacttccttcagcttgtccttttttgacatattccccggctcgtttgatttgcagatcgagccagtctgtttccggctgtaaaccagagaccatttcggtttcatgcagccgctgcagaaactggccgaaacttttgatcagctttttcttttcagtatcccctttggcttttcttaaagccgaagtcagggtgattccatcctcaaatgacatgatgatatggctggcatgctgttcctgtatcatcccatagtaaataggaacaggcagacgacgagtttccgtcagttgttgtaaaacgaaggcttctctcattaaccattcccgatacttctgttgaaaagaacttttcagcaaaaatgcgtcttgaccggtcactatttttcgaacggttgaagtgcctccctgttcatccagcagcgacatatggtttatcgcgccgatcttactttccaattcagctttcagccatttgtccaacaactgccccctccattccgatctatcaatgcgtataaaaaaacgagtataaaaccgtccattttatactcgttttttattcattaatcttcggctttttcaactaaatccgaaaagagaccgtatacgtaagattctgcatcaaaccgctggagatcgtcaaccttttctccgaggccgaccagtttcacagggatgtgaagctcattgcggatcgccaggacgataccgccttttgcggtgccgtcaagcttcgttaatgcgatacccgtcacattcgtcgctttggagaattctttcgcctgcgccatcgcattctggcctgtcgtcgcgtccagcgcaaggagaacctcatgcggggcctcaggcacttcgcgttcaatgacgcgtttgaccttttcaagctctttcattaagttaactttattctgaaggcggccggccgtatcacaaatcagcacatccgctcctcttgctttagccgcgtgtacggcatcataaataaccgccgcagggtcgcttccggcagcctgcttaatgacaggcacgcctgtacgctccccccacacttcaagctgttcaatcgccccggctctgaaagtgtctccggcagcgagcacaacggatttgccttcattcttcagcttatgggcaagttttccgatcgttgtcgtttttccgacgccgtttaccccgacaagcagaataacgttcaggcgcccgtcctgaatatttaattcagaaatctgttcgtcgccgctgttataaatgtcgacaagcttttcagaaatgacggactgcacttcctgaggatcctgaatgtttttcagcttcacttcttttttgagctcatcaatcagctccatgacggttgtaaaacctacgtcagcgccaatcagcacttcctcaagctcctcgaagaaatcctcgtcgactttccggtagcgggagacgagttcgttcactttatttgagaaggaatttcttgttttttcaagaccatctttaaatttttcagagacggagtctgtctgtttcgtgattttctcttttaattttttaaaaaagctcatctttcaacctctttcctcgttactgaataaattcttttgtttcttccagtttgaccgaaaccattcgggaaacgccggattcctgcatcgtaacaccgtagaggacatccgcttcttccatggtgccttttctgtgggtgatgacgataaactggctgtcgccgctgtatttttttaaatattgcgcaaacctgaatacattggcttcatcaagcgcagcttccacttcatcaaggacgcagaacggcacgggccttactttcagaatagagaataaaagggcaatggcagtcagcgcccgttctccccctgacaaaagatttaagttttgcagttttttgcccggaggctgcgcgataatgtccaccccggaattaagaagatcattcggatcagtcagcttcagttcagcccgtcctcctccgaataaagaacggaacacgtcgttgaattgagaacggatctggataaacgtttcatggaatcgcttcgtcatttcagaatccatttcttcaatgacttgaaacagtgtgtttttcgcttccgtcaggtcatttttctgctctgttaaaaactgataccgttcgtttactctttcaaactcatcgatgctgccgagattgaccgttccgagctcttcaattgaaagcttgatcagtttgacccgttttctcgcctcttcaggctcgagttcaagctgatattgttcttttgccccttcaaaggataagctgtactcctcgcgtaaatactgcaagagattatcaagctcaacttccatccggccgagttttacctcttcatctttcagaatgtccgttttttgcttgtacagacgcttcatctctttcagctcaagctcgttcgtatcaagagcccgctggagcttcacacgctggtcgcgccggctggcgatcaattcgatcgttctcgttttatcgtgaagcttatgatgggctgcttcttcaagctgctcctcaccgcttgtgctggacgtcatctctgaggtcaggaggcttaaatcttcccgtgtttctttcagagcgagctgcgtttcttcaagctcttttttcagccttttgaggttgtcttcctcactcgagcacgcctgttcttttttcgcagcggccactttacattccgtcagttcatgagagagcgtttcttttgttgaggatagggtctgcttttgttttgtcagcctttccatctcttcctcaagctctttcagctggccggatgcctcactcagctgttcttccagagctgatttgcgcgtctctttttcccggctgctttccgtcagtgatgctttctcctggtcgtaaagctccagatgggtattgatgttcttttcagcaacttcgagttcatacagcctgccttttacatcctgctgctttgttctgaaagcctcaccgtcttcacggagaccgctcagcgtatgttcaagctcttgaatggcctgcttcagcgctttgacctctttttcgagcagagctgttttttcttccatttcggcaagccgcgcagtcaccgtctcaagctcgcggcttctgccgagcagagaattgtttttctttttgaccgcgccgcctgtcattgatccgcctggattgacgacatcgccctcaagcgtgacgatgcggtagcggtgcccgagaagcttggccagttcattcgcgccttttaaatcttcagtgatcagcacggtgccgagaaggttttgaatgacattccgatacgccgcatcatatgtgacaagcccgctcgctgtgccgaggaaagacggatgctttgaagccgtctgttcatcacgggtttgaagctggcgcggtttcataactgtaagcggcaggaacgtcgcgcggccgaaggaattctgttttaaatattgaatcgctttccgcgccgcctgctcatcgtctgtgacaacgtgctgcgccgctgcgccgagtgcaatctcaatcgccgtttcatatttttgttcggtcgcaatcagttcgagaacggcgccgcggatgccgccgagctgctctttctgcttcagcacttcttttacgccttggtaaaatcctgaaaaatcgccttgcatcgtttcaagcatatcttttttggatctggcctgctggacgaattgatatgcctgatacagcgctgattctttcttttcatactggcgttttttctgttcatatgctgtctggacttcgcgaaagcggacgacctgattgtgaatatcctcttcaacggcggccaattcctcttcgcacgccgctttgcggactgcaatatcgttacgttcttcaaggtatttttcattgtttgcggtcagtctcgcctgctggaccgcagattgggacatctgatcatctaaaagctgcagctcgttgcgaatcgacgcctggctgtttaacaattcaaagtaatcgctttttaattgttcgattttctcttctacattttcattatgcagactgagagcctgctgcttttctttcacctgggcgtttaaccgcttcacttccgcacgaagtttatcatagacggcagactgtttttcaatgtccgctttcagttcggcttctttgttcgtgtaatgtgtaacggattcctctagctgttcccggttttgcgcggcgttttttttgcgctctttcagcacttctttccggccttccagcttttccagctcttcacttgtcacgagcagcacctgctgcagttcgttgacggattcatcaagcgcgtggattttatctctcgtctcttctatcatcgcttcttttgcggacagagctgatgattccgccaattcttcttgttttgccgtctgcaccttttcttttaaacccgaccatctgctatgcagttgttcgatgtcaaaggcggtaagggcgatttcgacatgctcaagctctttctttttttctaagtagtctttggcgattgatgcctggattttcagcggttcgacctgatcttcaagctcgtggagaatatcttccaccctgtttaagttatcctgcgtctcaaacagtttgttttccgcttttttctttcgtgttttatatttcagcacgccggccgcttcttcaaaaatactgcggcggtcttccgctttgctgctgagaatctcttcgactttcccctggctgataatggagaacgcttcttttccgagcccggagtccataaataagtcaatgatgtctttcaggcggcactgctgattgttgatgagaaattcactttctccggaacggtacacccgcctcgtcacgctgacttcgtgataatcgatcgggagaaaatgatcttcattatcaagcgttaacgtgacttcggcaaggttcagccgcttgcgcgaatcacttcccgcaaaaatgatatcttccatttttccgccccgaagcgagcgggctgattgttcgccgagcacccagcggatggcttcggtaatgttgctctttccgctgccgttcggaccgacaacggccgtgacgccttttacaaagtcaacggatatccgttctgcaaatgatttaaatcctataacgtctaaacgtttgaggaacatcccagatcctccttatcgtataagtatctcaatattatcataatcacccgcttatatcaggcgcagacatactgaaatccccctagggatacagggggattttattgtttcgtatgatgtttttgcaattttgcaagagcttcctgtgccgcatgctgctcggcttcttttttggaacgtccgttcccgataccgagcgcctcacctttaagagagacgagcgcctcgaattcccggttgtgggcaggccctttttcattgagaattttgtactcaagcgatccttttccgtcccgctgtacaaattcttgaagctggcttttgaaatccatcacatgagaaaaagcaccatcgtttattttagggaacacgtactctttcaggaattgctgaaccggctcaaggccctgatccagatacagtgcgccgataaacgcttcaaacacatccgctaaaagcgcaggacgctttctgccgcccgtcatttcttctccttttcccaagagaacaagatcgccgaatgacaattcgtgggcaagtgagacgagtgacggctcgcatacgatagcggctctcagcttcgtcaaatctccttcactcatggccggatatttggcaaataagaattgggagatcgtcagttccaaaacagcgtcacctaaaaattcaagcctttcgttgtcttcatacggctttttccgatgctcattcacataagatgaatgtgtaaatgcttgatacaaaagtttctcgttttgaaaatgaaccgaaatccgttcttggaactctttaaattgctctatttttttatagaacttttttttatctttaaaatgtgagtgttttgacatagtaacctccataggcacatcaggttcaccgcgctccccgccgtaaacggaatcagcagcgcgtacagcgtcagacgccggtaaccgaacgattaaagggctaaagccccgctgtcaggcgggacttttagcatcagcttattgctggttttgtatgtagttcacagcgtcgccgactgttgcaatcttttcagcatcttcgtcagaaatctccatatcaaactcgtcttcaagttccataacaagctcaactacatctagggaatcagcacctaagtcttccttgaaagaagcttcaagtttgacgtcagcttcatcaacgccaaggcggtctacgatgattttcgttacacgctctaatgtatctgccatagcaattcacctcccctcaagtattatagaggattcgtttttaaaaaactagagaaactaggatgaaattttaaaaacaaatctttacatcaccattccgccgtcaatatgaagggtttggcccgtcatataacgcgatccttcagaagcaaggaacgtaacaacgctgctgatatcggaaggatcaccgaaacgcgcgagcggaatctgcttcagcatttcatcttggacttctttagaaagcttgtccgtcatatccgtggaaataaagcccggagcaatggcattgaccgtaatatttcggctcgcaagctctttggctgatgacttcgttaagccgattacaccggcttttgccgccacatagtttgcctggccggggtttccgctgacgccgacgattgatgatacgttgataatccggccggagcgctgtttcatcatctgtcttgtaacggctttcgtgcagttgaatacaccttttaagttaatgttaatgacatcatcccattcattttctttcattctcatcagaagattgtcttttgtgatccccgcattgttcacgagaatgtcgattgaagaaaatgcagcgacagcctctttcatcatgttttgtacttcttcggaatttgatacatcggcttttacggcgatcgcgtttcggcccaaagatttgatctcatctacgacttcgttcgctttcgcttcattcccggagtagttgactactacattacagccgtttttcgcaagatcaagcgcgatcgcccgaccgattccgcgggacgctcccgttaccactgctgttttttcattaagcatcctgattctcctccttcagcgtttgaatcgccagttcgatggtttcatggtcagaaaccgagattgttttaaggcggcggttcacttttttcacaaggcctgaaagcacttttccgggcccgatttcaacaaacgtcgtgacgccttcgtcaatcagtttgttaatggtttcttcaaagcgaacaggcgaatacagctgttcgatcagttttttcttgatatcgtctttttccgtcataacgtcagccgaaacgtttgaaatcacgggaacagccgcattttttaactcacaggcgctgagcacctcctcgagtttttgcgctgccggcttcattaattcagaatggaacggtccgcttacttctaatgggatcgcccgttttgctccgttgtttttcgcttcctctgaagccagctccacgccttttgccgttccggaaatgacgatctggccggggcagttcagatttgcaagctgtacgagatgaccgttttccgtcacttgatccgtcacctttttcaaggactccgcatccattccgagaatcgctgccatggcgccttctccggccggcacggcttcattcatgaattctccccgttttcttaccgtgtaaacggcatctttaaatgtcatcgctcccgccgcaacaagcgccgaatattctccgaggctgtggccggcggtgaaatcaggggtgatgccggattctttaaacttttccaatacggcgatgctcgttgtcaacagcgcaggctgcgcattgtatgtaagggtcaattcttcggcgtcaccttcaaaaatgagcgagctcagctttgtttcaagcgtttcatccgcttcatcaaaaatacgttttgacgcttcttcgcgttcgtacaggtcttttcccatgccgatatattgtgatccctgtccgggaaataaaaatgcaatcttactcatgatgcggtaacctccagactactcatctgttttttcttcttttacttcttcttctataaatgcggccacgttttggctgaccatttctctcgcctggcgcagcgcatggtaaacagcgcgtgcgtcagaagagccgtgcgctttaatgacgggcgctttcaaaccgaaaagactcgccccgccgtactcagaatagtccattttcagtttcatttccatcagcttcggctttagcacgcccgctgcaagcttagaaacaaaacttgaagtcagtgtatctttcagcattttgaaaatcgataacgctgaaccttccaatgttttcaacgtgacgttgcccgtaaagccgtctgtgacgatgacgtcagcagcgccttcgagcaagtctctcgcctcaacgtttccgacaaaattcacgtttgtttcttttaataattcaaacgtcttttttgtcaggtcgtttcctttcttttcttccgtgccgacatttaacaatccgacgcggggcgagctgattccgagaacctgccgggcataaacagatcccataattccgtactggacgagatgctccggtttggcatcgacattggctcccacgtccaaaagaaggaaaccgtcgcctgaaacggtcggaagcgtcggcgcaagcgcaggccggtcgattcctttaattctgccgacgataaacagtcccgctgtcatgagtgcgcccgtattccccgctgagatgcaggcgtccgctctgttttcagccacttcctgcgccatcagcaccatagaagagtttttctttctgcgtacggcgcggaccggttcatccgtcggttcaatcacttcatcggcgtgcaacacagtgatgcggtctgatgttgttggcaagtgtgattctatcgttgtcttgtcaccgaccagcgtaatatgaagatcgtcaaatgcctcaatactcttcattactccgtcaataacagctttgggtgcgttgtcgcctcccattgcatctacagctattctcatgcatgctccacctttatgattgttttgaacggtacatgtcaaagctgccggagaacacgacttcttctcccacatagctgttgacttcaactaccgttctgcctttttctttttcgactgccgtcactttggctttcgcaacgacgcgctcgccttctttcacctgtcttgtaaagcggatatttgcgcttgcggtcagcgccagctcatcatcaatgacggctacggcgagtgagttcgcctgcgcaaacaaatgatgcccccgcgcaatttgattgcggctgaagacatgttcgcgtcttacttctaatatggaaatggcctggccgtcaagctccagatcaatgatttcaccgatcacttcgtctaaagacaatgatttcacttcatcatcaagcgtttgttctgccacgtttttaattctttccctcagctccggtattgagagctctaagcggtctaaacggatcgtctgaatgctgacgccgaatttccccgctaattcttcatctgtgatgaagggtgtcgatttgatcgtctgctgcaataatttttggcgttctttcttgcttcttctcatctgtaaacaccatccggacaattaagactaggtactaatagtagtatataatctcatagattggaatgcaatgattgttttttgaaagccgccgaattttacagaatcagcttaatttctccccttctaggacgccgcttgaaagtaattgaccgcgcagcatgcggtattcgtcatctttccaaaaagcctctgaagacaccagattggccgcatcctggcgggccgtttccaaagctctgtagtcatgaaccatatccgccaccttgaactcgggcataccgctctgtttttttccgaagaaatcaccggggccgcgcagttcaaggtccttttcagacagctcgaagccgtcgtttgtctctgacatgattctcatccgttccttcccggtttcggatttcggatcggccatcaagatgcagaaagattggtggtctccccgcccgacccggccgcggagctgatggagctgagataatccgaaacggtcggcgtcatagatgaccataatcgtcgcattcggcacgttcaccccgacttctacgacggttgttgacacaagtacctgacattgattggcgctgaattctctcatcacttgatctttttcatcagaatggagcttcccgtgcatcaggccgacattccatttaccgcggtaaacgtcagacagcatgttatatacgtcaatcgcattctgtacatccagtttatccgactcttcaatgagcgggcagataatataggcttgccttccctgcttcagctctttttctataaaagccaaaatccgctccagcatgtcgtgtttcacccaatacgtttcgatttgttttcgccccgcgggcatttcatctatcacggaaacatccatttctccgaagacggtaatggccaacgttctcggtatcggggtggctgtcataaacagcacatccggatcttgacctttattcttgagttttttgcgctgttcgaccccgaaccggtgctgctcgtccgtaataacaagactcagcgctttgaattccacttcatcctggattaaagcatgggtccctactaaaatatcaatctctccgagagcaagccgctccaaaagctccctgcgccgctttccttttacagaactcgtcaaaagcgcgatatttacatcttcatttgcaaacaacgatacgagagaatctgcatgctgttcggccagaatttcagtcggcaccattaatgccccctgatgccccgacagaatcgcagcgtacaaagcgatggcggcgacggccgttttccctgaaccgacatcaccttgcagcagacggttcattcggtaaggggatgtcatatcagcggtaatttcccgaagcacgcgcgtctgtgcggtcgtgagcgaaaacggcaggctgtctgtgaaagcggtgagcttttcagcaggaaacacatggctgatgccttttgactgttccctttccgctttacggaacgcctgcattttcagctgaaataataagaattcctcataaacaaaccgtcgtcttgcctgctgtaacgattccctcgtttcaggctgatgcatcgtctgcagggcatgtttgtaatcaggcagcttatagcggattctcaatttttcaggaagcggatcggccgcactgtccaaatgatgctgcagcgcttccttaataaaccgtctcatcatttttacggtgacgttttctttaacggaataaacaggctcaatgcttttatcttcttgatgaggaccgttttttaattcctgcacggaaacggtctgtctgtgtttatcccatttcccggatatcgtgacgacagaacctaacgtcagtttcttttttaagtagggacggttaaagcagaccgcggtaattaaataattgccgacaagcaccctgaatgtcagcctgtttcgttttttgccgtaataggtaagagaaggttctgaatgaaccttcccttctaccgtcactctttcttcatgttttacttcttctaaatccctcagctcatagtcgtcataacggtaagggaaataattcagaagatcagaaatgtcatagataccaagttcgtgcaatgttttttctgtttccggcccaatgcccttaatttccgctatactagtttgctgatggtgtgtcacttgatttcagcgctcctccgaaaatttttttctctaattctcttcccgtcggtgtcgcagctaaaccgccttgtcccgtttcacgcagtgctgtcggcattgtctggccgattttgtacatcgcgtcaatcacctcatcgcaaggaatgcggcttgtaatcccggccagcgccatatccgccgcgatcatcgcgttggatgctcccattgcgtttcgtttgacacacggcacttctaccaatccggcgaccgggtcacatacgagaccgagcatatttttcagtgtaatcgccattgcttccgctgattgctgaggcgttccgcccgccatttccacaatcgcggccgctgccatgcctgatgctgacccgacttccgcctgacagcctcctgccgctcctgaaatactcgcattatttgctacgacaaaaccgaacgcgccggctgtaaacagaaaacggatcatttgttctgtcgtagggttcagcttatgctttacggcgaataacgttcccggcacaaccccggcagagccggcggtcggtgtagcgcagatcgttcccatcgccgcattgacttcatttgtcgccacagctttagaaacggcgtctaaaatcagattgcccgaaaggcttcttcccgattggatgtatgcctgaagtttcacggcatctccgcctgttaaaccggtctgactcgtgacgcccttcagccctttttcaacagctgcttccatgacggagagattgcgctccattccttgaaagatttcttctcgtgttttttgcgtcacttccatctcttgggtgatcatcacttccgaaatcggaatttgtttttcttgagtgatttctattaattcttttacattacgaaacatgtcattttcctcctgactttttagtcagctatcttagtaacctgtataatattaggaagtgttgaaagctcgtcaagcacttcttcttcaatattctgatcgacctcaatcgtcatcagcgcaagctggccgacgtccttacgcgccacttccatatgtccgacgttgatggagaatttcgcaagcacattggcaacgcctgcaatcgtgccgaatttatcattgtgaacgactaaaatagccgggtggtttccggaaagtcgcagctcaaagccgttaagctccgtgatttctatttttccgccgccgatggaaataccggtaagggcaagctctccctcatcatcagaaatgacgatacgcgccgtattcggatgaacgggcacggcatcctctgtacggaactctacatatatgcccttctcttccgcaatttgaatcgctgttttaatccgttcatcaaatgtatcaaaatcaagcaggccgccgataatcgcgacatcagtgccgtgacccttatacgtttctgcaaatgatccgtaaaaagacacaacgatccggcggggctcacgcctgaataagcttctggccactctgccgatccgggcggcgcctgcggtatgtgaactggacggaccgatcatgaccgggccgataatatcaaaaacgcttctatacttcatgctggtttgctcctccttaacatcacttcattcagcgcttttctttagactaattgaacatttctcaattggcaagcaggcacactgccgcactgccgcaggtaaataaaggcataagaatagaagggcctgataagcccttctattctgccgcaaatatatatggatacagaggctgtctgccgttatggatttcaacctcgatatcttcacagacgctagcaatatactcagcgagtttctcagcttcttcttccggcgcgtcctctccgtacaggatggtgacgatttcatcttcttccccgatcatttcatccagcagcaatttcgccgcacttatccgatcttcggcgctgccgataattgaactgtttaaaatgccgataaaatcaccttttttaatttctttgccgtcaatatgggtgtctctgactgaatatgtcacctgtccgcttttcacattccggatggcctcaagcatattggcttcatttacatcagccggctggtcagggttaaacgcaagcagggcggtcatgccttgagggaccgtttttgccggaatgacaatgacattttcttcagctacgctcgccgcctgattggcagccatcacaatattggaattgttcggaagaatgaaaaccgtctccgcattgacagactgaacggcttcaacaatatcttccgtgctcggattcattgtctggccgccttcgattacgtgtgaagcgccgatgctcgtaaacaattcagaaatgccctctcccattgccacagtcacgatgccaaaaggcttgcgggcttctttcataacgccggccggctttttttcatcatgttcttggctgatgattgaagtatgctgttccctcatgttttcaattttaattttaatcagatcgccgtaacgctgtgcgagattgagtacgttcccaggttcttcggcatgaatatgaactttcgccagcgtatcatcagccacgaccagcaatgaatcgccgaaacggctcagttcgtttctgaacgcctcttccttgaacgtccgtttatcttgatccagcctcaccattacttccgtacaaaatccgaattcaatgtcttctgtactcagcatgctctgcgcgcttttatgatgctcggcattcaccatatcatcgagtgccggaagaaccgcttttttcggtacggcctctccttttaaagcagccaaaaagccttcatatacacaaagcagaccttttccgccgctgtcaacgacaccgacgtcctttaaaacaggaagcagatccggcgtgcggttgagcgacgcttccgcttcttcaataacggcctccatgactgaaataatatcggtttcttctttggccgaggcgaccgcttttttagccgcatccttggccacggttaaaatcgttccttcaaccggtttcataaccgccttatatgccatatccactcccgcttggagtgctgcggcaaactcttgggcatcaatttggtttttgttttcaatgctctttgtgaaacctctgaacaattgggacaagatcacccctgagtttcctctcgctcccataagcaggccttttgacagggcgatgccgactttgccgatgtcgggtgagtcaatgtgctctacctctcttgcaccggatgacatcgataaattcatatttgttccggtatcgccgtcaggcacgggaaacacgttcagcgcatccaccgcggatgcgttttgagacaatgtctcagcccccgccagaatcattgccgcaaaagctctcccatctaagtttcgtctagacaatactcatcctcctcactacgggttcgttactcgtacgccttggacataaatatttacagaatcaactgcaagtccgattgtttgatttactgtgtattttaccttcgtctgaacattgtgggctacttcggatattttagtgccgtagctgacaataatgtacatgtcgatatgtatttgttcggcttcctgacggacatgtacgccttttgcgaagttctctctccggaggatttcagacaaaccgtctttaatctggttttttgaggccatccccactattccgtaacagtcaatggcagcgcctccggcaaccattgcgatgacttcgttggatatatcaatctgtccgtattttgtcttcatttcaatggacacacaggttcctccttcaggtgcatagagttatcattattctactatatgtatcccattatgaaaagaaaagatacagacagcggccttcagcgcggaaatgtgattggttttacatgtcaagtgatttttcttgaaagtaagggaaacaatagttgcaaacggtttttagctgtggtaaattatttaaagtattgtataacgaaagcatctgagacactatgtttaaaaagatgtttcgcgcagttaggagggaaacaaatggcacgtaaatgttttattacaggtaaaaaaacaaaagccggaaacaaccgttctcacgcaatgaacgcttctaagcgtacttggggcgccaaccttcaaaaggtccgcatcctcgttgacggcaaacctaaaaaagtgtatgtatctgcccgggctttaaaatccggtaaagttgagcgtgtataagcaaaaatgaacgcctgcccttttatgcggcaggcgttttttatgcgttcaaagagggcgatttcagcttcttgggcttactcttttctaaatgagcccagcatcgcccggacaattcctcctaaaaacttcggcaatttaatggtataaaatttcattttgtcccctcctataagtcccgtatccgctgcgttcatcactttaggattcatggttttttccgcatatggcagaagccgcttttctaatccgcgctccttaccattattaatatgccttttgcaaacgaaaaagtacctcgtgaatgaatgagttcgttactaatacatagtgtggaacccagaggaatatgacaattatcaaggggatatttaaaaccgtcgagtgtcaggccgtctgccgcttccgtaaacggaatgaaagaaatatagcgtctgcgcgctttttcttcaattgtataacggccgggcccgaacatctgaatgtcattctgccggtcgatcagcttgacatcggtatgcttatgtaaggctttatacagcagctggatgttccctaaaaagtgatcggctcttccgcccgtcacaccgaatacccgaatgttttccggttctttttgtaaagcccagtcaagggcgagttcaagatcggtataatctttttccgcctgatacacatggagggccggcgccgctttttgaatctgcatgagctcctcttccgtaatgctgtcaaaatcaccgaaagcttcctgcggaatgattccggcctccaaaagagcaaccgtccctttatcaactccgacccacgtcgtatctccgtctgtgtattcggatagatcgggaataagctcccgcgggccgcccgcaacgatattgattgtcttcatatgctatcctctctcttagacgcgaaaagagccggcggctttcaccgggctctttttcagcatgtttatgatgcgtttcggatgtcagcgatggcttttttccgatccggctgattatatacggcagacccggcaacaagcagattggcgcccgcttcagcgcataaaggggctgtttctttattaacgcctccgtccacctcgattaaaagctcagacaggcctttctcctcagccagctgtttgacctgacggattttcggcagaaccgaatgaatgaagcgctgtccgccaaaaccggggttaaccgtcattaacagcacaaggtcaagctcctcgatcacatgttcaatcatttggacgggcgtatgcggattaagcacaactcccgcttttaccccctgctcttttatcaattgaatggtccggtgaagatgcggacacgcttcagcgtgaacggaaaggatgtccgcaccggcttttgcgaatgccgggatgtagcggtccgggttttcaatcataagatggacatccagcggcagatcagtcaccggacggacggcttcaacgataagcggcccgattgtaatgttagggacgaaatggccatccatgacatcaatatggatatagtccgcccctcctttttccacgtctttaatttcctcgcccagtgaagcaaaatcggcggaaagaattgatggcgcaaccttaatcatattaatacctcggctttctctcttttatttcctgcataaattctttgtaatgctcgtagcggtacggctgaatctctccttcttccaccgcttgctttaccgcgcatttcggctccttaagatgcagacagcctctgaatttgcaggaggcgcttatttctctgatctcagggaacgtgctgcccagctcttcttcctcaatgccggtaaattcaagcgaactgaaccccggagtatccgcaaccagaccgcctgatgtatgaatgagctccacatggcgcgtcgtatgttttccgcgtcccaaatgcgcggaaatctcgtttgttttcagctcaagctccgggctgatcgcatttaaaagcgaagattttccgactccggactgaccggcaaacaccgtcgttttgtcctcgaagtgtttcacaatgcctgttaagccgctgttttcttttgatgacgtcacatatacgtcataaccgatcgcctgatagtctttcacgtaagaaagtatcgcctctttcgattccccgtctgcagctaagtccattttggttatgcagatgatcgggtgaatgccgttggcttccacaaggacgagaaaacggtccaataaagacgtgctgaacgccggctgaacggcagaaaagacgagaacggcctgatcgacatttgaaatcggcggcctgatgagctcatttgttcgttctttgatttccagcaggtagccttctttatcattttcagcctgataaacggcataatcgccgaccaggggcgttattttattttttctgaaaatgccccggcctctgcattgaatgatcttgtcctgtgattcatccaagacataatagaatccgcttaacgcttttataattttgccctcaggcatagggtccctccttatcagtcattatctttcgggtattcaatcgttttgtagctgacgactttatgatcgaccatcacttgataataccccttctgtccctgatcaatcttcagttcaattgttttttcggtcggctcttttattttaaatgagtcatacgtatcagagatgctgtggtccttatcatcgatggcgatttgcacttcaagctcttccccttcatgttcgggttcgtaaggaatgctgattttttcttttaccgttttcgccggtttttcttcaggtccgagcgagaacgtcacttcaacattacttcccggcttaaccgcagtgccggctgacggctcttgtttcatgacttgtccttccggcacgtcatctgaatgggcttgtttttcaacaagctgcaggccgttatcttcaagataccctgaagccgcttctttgctgtaagtctttaagtccctcagcgtaacgtccgccgggccgaggctgaccgttagattgacttcatcatcgcttgcgaccatatcggtgccggctgacgggtcctgatcaattacggtgccggcctcgctgtcatcgttttcttctttgacattgacatgtttgaaacctttttccttcagcgctttttttgcgtcgccgatctgccgtcctttcacgtcgatcagctgggttttcggttttccgatgcttttgtacagttttacagaagagccttctttaacggtagaccccgcttttgggtccgttttgaccattaattcctcttctattttttcatcttcaatatccgttatatcaggatcagcccggagcccgttcttttcaagcagggcttccgctttttcgtacttcatgccccgtacgtcggggacgcttacatctttaggcataaataaagacgggaacacggtgaccgcaagaacagccgccataataaaaatgaaacagacggccagcaaaacccacggccatttccgttttttctttttggctggctgctgttccttatcatccgtctcccccggcgtttccgcctgagacgcggcttttgggccgtcagtaataacgggaatggcttttgtcatttcctcatcatcctgcacggaaaatttttgttcattcagcctgccggcgtcaaaagccgttctgatgtccgcctccatgtcctcggcgctttcatagcggtgaaacgggtctttggcggttgcctttaaaataatgttttcaacgctctgcggaatggaagggttccactttctggcggaaggcgtttctgtttgcaggtgctttagcgctatgctgacggctgattctccgtcaaaagggattttgcctgttaaaagctcaaacagcacgatgccgagcgcgtaaatatctgattttttcgttgccagaccgcctctcgcctgctccggagacaaataatgaaccgagcccagcacagaattcgtatgtgtgattgtcgtagacgtaagcgctgtggcgatgccgaaatccgtcaccttgatatgccctaaatgatctatcaatatattgtgcggtttaatatcccggtgcacgatatggttttgatgggcatgggcgatggccgagacgatctgctccataacggacagcgcttctttcggatgaagcggtccgtgtgcgtttatgtattcctttaatgtcatgccttccacatattccatgacaatgtaataaatatcgccttcctccccgatatcgtaaatactgacgatattcggatgatcgaggcttgatgccgactgtgcttctcttctgaaacgcctgataaaatcaatgtcattcacaaagtcaaaccgcagaattttaattgcgacttcacgttcgagaatgatgtcctcagctaaaaaaacgtttgccattccgccgccgccaatgggccggaggatatgataacgcccgctgatccgcttgccggttagcacttgtcttcaccctcttttgcatctgcggaaaactcaatcaacacagccgtgatgttatcttcgccgccgttttgatttgctttgctgatgagaaggtctactttttcctgatgatcagattcggcttgaagcatttgtttgatctcgtgatcttctattttatttgacagtccgtcagagcataaaagcagctgatcgccgtcagacagttcaaaagaacgggcgtcggggctgatggtttcatctgtccccagcgctctcgtcaatacatttttccgcggatggtgctcggcgtcctctttcgaaatctcccccgtcttgaccagctcattcacaagcgaatggtcctcagtcagctgagtgaattccccctcttgaagcaggtagcaccggctgtcaccaatatgagccacagtgacaaacttccccgtgaataaggcgcagacaatggtggtgcccattccccggcattcttcattggctttagcgtggtcatgcactttgacattcgcctcatgaatccggtctttcagccaatcctcgcaagcggacggcagagaaggaaccgtttcggtccggttccactgctcttccatcgccgcaaccgccatcctgctcgctacatctccggcaagatgaccgcccatgccgtcggcgacaaccgcaagcaccgcgtcttcttttgtgaaaatgcccgccgcatcttcattatgccggcggactttacctgtatctgttttcaaggctgtaatcaacctcttcacctcgtctcgtcttgacgctccttcgcgcgaagctgaccgcaggccgcgtcaatgtcatggccttgctctcttctgatcgtgacatttacaccgcgggattttaacgttttttcgaatgcgaaaatctgatctctcggtgtgcggacgtaatcccgttcaggcacatagtttaccggaattaaattgacatggcatttcacgtcttttaacagttctgcaagctcttctgcatgttcgacctgatcatttacgccgccgaacagcccgtattcaaagctgatccgtctgcctgttttctcgatgtaatatttgacggcctccataaggtcaggaagcttataggctttgttaatcggcatcagacggcttctgatttccgtattcggagcatgcagagaaatcgcgaaattgatctgcattttttgatcggcgaaatcgtaaatcttcggaatgattccgctggtggaaactgtgatatgacgcgctccgatgttcagccctttatcgtggttaatgatttttaagaaagcgagcatttcattgaaattatcaaacggctctccgattcccatgatgacgactgagctgacgcgttcatccgtttcatcaagcgccttttgcactttcacgacttgagcgacgatttctcccgcttcaagattccgtttcagaccgccgagcgttgacgcgcaaaatgtgcagccgatccggcagccgacctgtgtcgttacacatacagaattaccatactcgtgtctcattaaaaccgtttcaatcgtataaccgtcatgaagctcaaataaaaatttcatcgtgccgtcttgagatgtctgttttacagccgttttcagcgttgtcagcacaaaattgctctcgagtttttcacgcaggctttttgagaggttcgtcatttcatcaaatgaagaaacccgcttttcatagagccattcaaaaatctgtgctgcgcggaacggcttttcgccattctcggtcagccattgtttgatttcatctaattcaaaagagtaaatggacggctgctcagtccgcagctctttccgtacgcttgtcttttttaattgtgtcatttttatcccttctttctcatgctgctaataaagaaaccgtctgttccgaaataatgcggaagaatttgaaggcttccatcctgaacaaagggtctcgccttttcaggcagccgcttttcaagagacaaatcgggttcaaactcagggtgttcttgtataaacgcatgcataacttcttcattttctgtccgatccattgtacacgtactgtatacgagtgtgccacctttttttactaatggggcgatttcccttaaaatgccgagctggatttctgacagccgtctgctgtcctccggcgtcttcgtatatttcatatcgggttttcttctgatgacgccgaaacctgagcaaggggcatcaacgagaatacggtcaaaccgttctgcgccaaaggcctctcccgcttttcgcgcatccatcgtttgcgcgtcgatgatcgtaagaccgagccgttctgcgccctctttaatcagcttcactttatgacggtgaagatcaagcgatgtgaggctcccctcgttctccatcagttccgcaatgtgagccgactttccgcccggtgcggcgcatgcatctaaaacggtttcgcccggcttcgggtccagcgcccgggcgacaagcattgagctttcatcctgtatggatacccggccgttttggaaaaatgccgtgttcgcgatgcttcctttcaaaagcttaatcgcatcaggagaaaggtctccggcttccgcttccagaccggcattctccatctcattcagcaccgtttccctgtcgctctttatgtgattgacacggagcgtctgcttcggcggaatgagatgaatccggcagattttttcagccgcctcaaagccgtacgcctcgacccactcttttacgagccattcgggatggcttgtctctgtagaaagacggagaaccgggtcttcaatttcagcaaatgacggcgccccctcacgctgcagggagcggagaatgccgttgacaaaggacgcaatgcccttatgcccgcgttttttggcgatttcaaccgcttcatggatggcggcgcgatccggaattttttctaaatactccatttgatacgcggacagacgaagcagctgaatcacccacggcttcaccttattcggcttgcggataaaaggcttcagcatatagtctaaggcgattttattttgcagcgttccgtagacaagctctgtcagcagtcctctgtcctgatcgctgagcgtgttcgttttgataaccgatgtaagaagcaggttgctgtatgcctgattttgctcaagcttctcaagcgcttcaagggcgagctcccggacattaattttcttcatttgctgctcctaacacgtcaccgggctgcacatttttgcctcttacaaaatcttcgcccttcatccgttttttccccgccggctgcagctcagtgattaaaagggcggtgctgtttcctgatgcgacgacaatgccgttttgctccgtgcggatgactgttccgggcgcagcatcagtttttgccgcaactttttcagaagcccatactttaatagtttgaccgttcaaagttgtataggcgacaggccaagggtttaaacctctgatctggttgtagatctcttctccgggctttgcccaatcaatccgctcctgctcacgcttaatgttaggcgcgtaagtcgcttttgattcgtcctgtttgatcggtttaatatttccggagatgacgttcgggacggtctctgacaaaagctttgcccccgctatgcttaatttgtcgtgcagcgtgccgacgttatccgtttcatgaatttccacttcgattttagaaatcatatcgcccgcatcaagcttttcaaccatatacatgatcgtcacgcctgttttcttcttgccttggagaatcgaataatgtatcggcgctccgcctcttaattcaggcaatagtgacgcgtgtacgttgatacagccgtatttcggaccgtccagcagctgcttgggcaggatctgtccgaatgccgccgtaacaatcaggtccggcttcaggcttagcactttttctatttcttcttcgagccttactttttcgggctgaagcacgggaatgccgtgacgttcagcttcagcctttacaggagggggcgtcatgattttttttctgcctttcgggcggtcaggctgcgtaacgacaccaaccacttcatatccgtcttcaataagcgtgcgcaggacgggaactgaaaagtcgggcgttcccataaaaacgatccttgtcatccaatcatccttccatttctgccagttcttcttcagtgtagtaagccgtaatttttgatgtgaataaaatgccgtctaaatgatccatttcatgctgaacggctctggccaaaaaaccctccgcttctaaaataaacggttttcctttacggtcgtgggcttttacctttacgtaatccgggcgggtgacatcaccgaaaaccccgggaaaacttaagcagccctcgactccggtctgttcaccgctcttttcaagaataaccggatttacaaggtcgatccggccgctttcttcaccgatgtccacgacggccgctctttttaaaatgccgatttgcggcgcggcgagaccgacgccatccatttcgagcatcgtatcgtacatatcgtcaagcagtttttttaattttttatcaaacactgtcacttcatcggcgggtgtttccagaacctccgccgggtgtgtgacgattttttttacagccaaaattttgccctccaaaaactaatgttacatcagcatgtacggattcatatcaattgaaatcattacatgcttttgcgcaatgtcgcgtttatagtgctccagtatctttttcaactgaatctgcaactcgttttcctgtctgtattttatcacgcattgatagcgatatctatctttgatcctggcaatcggggaagccgccggcccgagaattttcgtatcaggcccgcatcccgctcttaaatagtttgtaatcttttctgcggtgaccgcggcttttgccgcttcttcatgagaaacggtcaccagcgccacgtaataatacggcgggtatgactgggcccgtctgtgcgccatttcctgctgaaaaaaagtttcatagtcgtgcgttttcgtcagctgaatgctgtaatgagacggtgtatacgtttgaatgaccaccgttcccggcttttcatgccgcccggcccgtccgcttacctgtgtcagcagctggaatgtcttctccgcggccctgaaatctgggatgtgaagcgtcgtatcggcgcttaatactccgacaagcgtcacgttcggaaaatcaagcccttttgcgatcatctgcgtaccgagcaggatatccgccttcccttcaccgaacgctgacaacagtttttcatgggcgccttttcttgaagtggtgtccacatccatcctgatcacgcgcgcctgaggcagcactttggtaagctcctcctccacacgctgtgttcccgtgccgaaaaagcggatatgttcgcttccgcattccgggcatgttcccgggacaggttcctcatggccgcagtaatggcatttcagcctttgtccgtagcggtgataagtcatggaaatgtcgcaatgcggacattgcggcacataaccgcagtcccggcacatcacaaacgaggaatacccccgtttattcagaaaaaggacggcctgctctttttttgcaagcttctcttccagctgttccatcagctctcttgagaacattgatctgttgccgtttctcagttcttctctcatatcaacgagagaaacgtcaggcatgagctggcggtttacgcgatgttttaacggaagcagctcataaacgccttttttcgcccgcgcaaatgactccaatgtcggcgtggcgctcccgaggacgaccggacagctgtgatgctcggcccggcggatggctacgtccttcgcatgatatcgcggcatttcctcctgcttataggaagattcgtgctcttcatcaataatgatcatgccgagattttcaaacggggcaaagatggccgatctggctccgacgacaagccggacttccttgcgctgaatcttccgccattcatcgtatttttcacctgtggataatccgctgtgcatgaccgcaacctgtgagccgaagcggcctttaaaacggttgaccatttgcggtgtcaacgaaatttccggaacgagcacgatggcttcttgtccttttgccagcactttttcaatggattgcaggtaaatttccgttttgccgcttcccgtgacgccgtgaagcagaaagacgtgatggacatggtcggctacagcttgtttaatcggctcaaaagcggcctgctgctcttctgtaagagagagcggctctgtttttttgaacattctgtcctgataaggatcgcggtaaacctcctcaaagctttccgtaagaagcccctttttaagaagcgttttcagcgtcgcggaactggaatcggtctttttgcaaagttcagccgcggaaatcttttctcccccgccgataaaataagtaagcacggcgagctgtttagaagcctgctttgtcaatgaatctgcgtgccgggcgagttcttctttgtctgcccccgcttcaatcatgcggatcatttttttattcgttttttgggcgactttatatgtgacatcaatgcttcctttacgcacgaatttctgaagtgacgaaagaatgctttcatcggtaatatccgagtacagaagacttttttgattcctgaaaagctgtttgatgtccggtgtcagcgcttcttcgtcaacgactttcagctctttctcgtacttcgccttcaatgcggcgggcagcattgcctgaagcgccgtgattttaaacgacagcgttttgtcagaaagccatgaagacagctgcatcagttcctcagtcagaacaggcgtcaaatcaagaagcttctcgacttccttcattgagccgccgtttaattcggacgaatctttcaaaccggtcacaaatccttgaagcttgcgcgggccaaacgggacaatcacccgcatgccgacttcgatcatcccttttaaatgatcgggaattttgtaatcaaagggtctgtcaatgtttttggagctgacatcgacaatgacttctgctacattcatacgggttttcggtcctcggctttcaaagctgtcatttccttcagcatttcaaaggaaacgtcaagtttagacataagcgcaagctcccgttttcttccgtcccggaaatagaaggtgacgacattcgtatccgtgccaaatccggccccttccgctttcacatcattcgcaacgatcatatcaaggtttttctgttcgagttttctgcgcgcatagcgttcgacgtcttgcgtttcagccgcaaatccgaccagcagctggtgtgttttccgttcgccgagttctttcagtatgtctgccgtacggttgaattcgatcacgagcgaaccgtctttcttcttcattttgtgatcagaaacagccgccggcgtaaaatcggccacggccgccgtcttaatcaccatgtcgcatgaatcaaacacagaaagcacggcttctctcatatcggctgccgattgcacaggaagaaactgatacagcccgactggcggctctattgacaccgggcctgaaatcagcgtcacccgcgccccgagacggacggcggcttcagcagcagcgtagcccattttgccggtggatttatttgtgaagaagcggacagggtccacggcttcgcgcgtcggaccggccgtaatgacaatatgttttcctttcagcggcgcatcgtcttcaggctccttaaaatgctctctgacacgctcaacaataagctccggctcctccagccttcctttgccgacatatccgcatgccaaatagccttcactcggctcgataaagcggaccccgtcctgataaagcacagagatgttccgtttcaccgccggatgatcatacatatggacattcatcgcaggcgccacccagaccggggcctcagccgccagcaccgtcgttgtgagcatatcatcagcaattccgttggcaagcttgccgataatatttgccgtagcgggcgcgacaataattaaatccgcccagtcagcggcatcaatatgagaaatcaccttcggattttgttcattaaatgtatctgtatacacttcattccggctcagcgcctgaaatgtcagcggagaaacaaactcacgcgcggactcagtcataatcactttgacatttgcgccggcctgaaccagcttgctcgtgagtgcggaagctttataaacggcaattcccccgcttacgcatagcaaaatgtttcggtttttcatgaagtcttctcctcctttatgaaagcattggacaaatcccaaacggaaaaaaataacaacctatgtagagataggttgctacgtgtgcttgttattcgctgtcttctctttcaaacgaaagcaggcccgcgtcaatttcttctaaagctttgcctacatatttgtgagaaatggtatgttcaatctgctggtcctttttgatctgcatttcacgcgcgcgtcttgcagacacagtcaccagcgtatatttagaatctaatttattcattaaagagtcaattgacggatctaacataagttattctacctccagcattttcttatatctcggagcaacgcgttcacgttttaagtgctcggcgagaacgattgcgttaatcttatcacaagccgtttggatatcgtcgttttcaacgacataatcatacgcgtccatcatttcgatttcagcttttgcggcattcattctgttttcgattaaatcgtcggtttcagtccctcttgtcacgattctgtttttcagctcagaaagactcggcggcgctaagaagataaacaggccttccggaaatgcattccgcacttggagcgcgccctgcacttcaatctctaagaagacgtcttttccttcttgaagcgtctgttcgacataatcaacgggcgtaccgtaatagttgccgacatattctgcccactcaagcagtttgttgttttcaatcatgcgctcgaattcatctctggatttaaagaaataatcgacgccgtcgacctcgccctctctcgggtttctcgtcgtgactgaaattgagtattcaaatttcgtgtcctgttgtgaaaatattgcttgccgaaccgttccttttccaactccggagggacctgagagaacgattaataaccctctttctttcatgcggcaattacccctgcccttcatccataatttcttctttcacagaaagtctgtgtgcaactgtctcaggctggacggcagataagataatgtgatcactatccatgacgacaactgcacgggttcttcgtccgtatgtagcgtctattagcattccgcggtctcttgcatcctggatcattcgctttattggcgcagactccgggctgacaatcgaaatcatccgattggcggagatgatattgccaaatccgatattaatcagtttaatcgtcatcttctacgttccccctgtaaaatagacgtctctagtgtaacctgaagagaccgtctgtaaacaatacgcacagtcgctattctatattttgcacttgttccttcaatttttcaatagaacttttcatttcaacgacaagctttgtgatttgatgatcattggcttttgagccgatcgtgttcgcttcccggttaagctcctgaacaaggaaatcaagtttgcggccgactgccccgccttcttttaatatatcacggaattgaacaaaatggctcttcaatctggtaatttcttccgttatatcagaacgatcggcgaaaatggcgcattccgtgatcagcctgctttcgtcgagcgcgtcctccgtccattccttcattcgggcgtaaagacgctcgcggtattgaataacaacggccgaagcgcgctctttcacctgttcggacagcgtctcaagccgctcaatgtgcagaaagcagtcttccgccaaaagccggccttctttttccctcatgtcacaaagttcctttacagccagctcagcggcttccctgatgacttcttcaagcttgtcatcacgcatctgttcttcgtgaatctgcgcaatatgttcaaatctaaagaaatccattgcatcgggttctgcggccaggctgtagcgctctttcatggcgcgtgcggcgctcacatattcatcaaggagctcccaatcgatgttcaggcttctttttatgagcgcgtcactgttgacagtgagaaacagctctactcttccgcgctgtatatgctgcaatatcgtttgtttcagcttatcctctacatatagcaaaggccgtggcaggcgggcgttcacttctttgaaccggtaattgacggatttcaattcaacggttgccgagagatcgccttttgtgctgcttgcgctgccgaagcctgtcatactccgtatcatatgaaacacccaattctttcccgttatcaaaataaaagggcaatagacatgctattacccctaagattatatcatatggaattatttttttcttgtcaaaagtgaacccgccagcaaaaaagtaggtatgccagacatcccgataatcagcatccaatcgcccggcgtaatcggcactgttttgaaaatcggctgcagcggcggataatagatgacgatggccatcaggaagacagaagaaacgatggcgccgagcagataaatattttcaaacggattccgggagaaaacagacgtttcgctccggcagtcaaacacgtgtataagctgagccaggacaagagtcgcgaatgcaacggtctgtgcgtagggcagattttcaggattgcggtgatagacgatgataaacgctaaaatggttgcggctccgattaaaaaccctcttgatacgactttccagcccagttttctcgcaaacactccttctttcggatgccgcggcttccgcctcatcaggtctccttccggctgatccataccgagggccatcgccggcagcccgtcagtgactaagttcacccacaatatctgaatcgggacgagcggcagcggcagagcgagaagcatcgcaaacagcatcactaaaatttcaccgacgttggaggccagcaaataccggacgaattttcttatattttcatagatattccgtccctcttttatggctgatttaatcgtagcaaagttatcatctaccagaatgagagaagaggcttcctttgccacatccgttcccgtcacgcccatggcaacaccgatatctgcctgctttatggccggcgcgtcattaaccccgtctcccgtcatggcgacgacgtgtccgttttcctggaacgctttgacgattttcaatttatgttcaggtgacacgcgtgcgaagacgtagacatcatcgaccgtttcgataagttctttgtccgtaagctcattcagcgtcttgccgtccatcacacgcccctttttcggaagaagacgcaaatcttttgcaatggcctttgccgtttcgacgtgatcccctgtgatcataaccgttttaatgccggcttcacggcattctttaatggcctgtctgacctccggacggggcggatcaatcatgcctgacaagccgagcatcgtcagatttttttccgcctgctccattgtcggcttttctccgggcttaagcggtttataagcaatcgcaatcgtacgcaaagcttgcgacgccagctctttcagaaccgcttccgtttctgctttcttttctcctgaaaaaggcgtacttcttgcgccgtgcatcagatgtgacgagcggtcaatcagcacatcgggcgctcctttagtgatgacgaactgctttttttcctgatcctctacaatgacggtcatcattttgcggacggagtcaaacggaaactcggcaaccacgcggtaatgcccgctgagccaatcgtttgaatagccgccctttcttgcagccgtcagcagcgctccttctgtcggatcaccgtcgagtacataacggccgtctttcagtgcgatttcagatgtgttgcacaacgcgccgaaaaccagcatctgttcaagaatcttctcatctttcggcttgatttcccgctcatctcgggtgaaaacgccctccggcacatagccgatgcctgacactttataaattttgccgcctgaccacatatgggtgacggtcattttgttttgtgtcagcgtgccggttttatcagaacaaatgacagaggcgcagcccaatgtttcaaccgccgggagctttctgacaattgatttttgtttgatcatgcgctggacgccgattgataatgccaccgtaacaatggcgggaagcccttccggaattgcggcgacggccaatgacaccccggccaaaaacatgctgtaaagatcatgtccctgtaagacgccgactgcaacgaccaataccgttaaaaggagcgcgacgataattaaaattttgccgagctcttcaagtcttcgctgcagcggtgttgaaaggctgccggcggattccagcatatcggcaattttccccattgccgtattcattcctgtaccgacgacgacgccgacaccgctgccgcgcgttacgatcgtacccataaacgccatattgctgatgtcgcctaacgaaacatccggctttctcaatttatcggcttgtttaaccaccggaattgattccccggtcagcgccgattcctcaatttcaaggcttttcgcttcaacgatccgcacatccgcgccaatccggtcgccgcttgaaaatttcatgatatcgccgggaacgagctccttggactgaattttcttccagctcccgtcccgcaacgctgacacatacggcgttgacagctcttttaatgcatgtaaagacttttccgcccgccgctcttgaaaaaaaccgagaaccccattgacaaatacaatcgccataatcgctacggcatctacatattcgcctaaaaacccggatattaaggttgccgccagcagcacgagcaccataaaatctttaaattgggcgaaaaacacggcgatcgccggtgtcctcttgccctcctgaagctcgttcggcccgtgcttttcaaggcgttttttcacctctttttcggtcaacccctgtttaatggacgtatttgttgctttcagcaaatcggtttgtcccatttcatgaaacttcattcttctcgtccactcccctgcctcgctttagagatgtcactctgtaaacaagcttattctgactcgtcccttttcatgctataattatcgaatgcaggaagaaggaaagggtgttttatatgtcttttgatggcatgtttacatacggaatgacacatgaattaaacagccggatcgccggaggacggatcacgagagtccatcagccttttaagcacgatgtgatattccatatccgcgccaacggaacaaaccacaaattattattgtcggcgcatccgagctattcacgggtgcacatgacaaaccaggcctatgaaaatccgagcgagccgccgatgttttgtatgctgctcagaaagcatatagaaggcggatttattgagaaaatagaacaggccggattagaccggattatgatattccgcataaaaagcagaaatgaaatcggcgacgaaaccgtaagaacgctgtatgttgaaattatgggacggcacagcaatattattctgactgacggagaaggatccatcatcgacgggctgaagcatttatctccgtcgatgaacagctaccggaccgttctgccgggctatgattacaagcttcctcccgctcaggaaaaaatttcgccgcttgccgcggatgaagaggacgttttgcgttatctcagttttcaggaaggacggcttgaccagcagatcgtcagacatttctccggtgtttctccgctgtttgcaaaagaagccgtgcacagagcgggtctcgctaacaaaataacgctgccgaagacgctgattgaaatgttccatgccgtgaaagattgcaggtttacaccgaacattacgacagccggcggaaaggaatacttttatctcctgtctctcacacatgtaaacggagaggagcgcacctttcactcactgagtgagctgttggaccggttttatttcggcaaagcggaacgcgaccgcgtcaaacagcaggctcaggatctcgagcgttttgtcgcaaatgaacggaaaaagaatgccaataagataaaaaagctggaaaagacgctcgactactcagaaaatgcgaaggaattccagctatacggcgaactgctgacggcaaatttgtatatgctgaaaaaaggtgacaaagaagcggaagtcatcaattattatgatgaagaaagtaagacggtgaccatccctttaaatccgaacaaaacaccgtcagaaaacgcgcagatgtattttacaaagtatcaaaaggcgaagaattccgtcgaggtggtaaaagaacagatccgtctggccgaggaggaaatcgcttatttcgatcagctgatccagcagctctcctccgcctccacaaaggatattcacgaaataagggaagagcttgtggaaggcaaatatctgcggccgaaacagcagagaggacagaaaaaacagaagcagcacgttcctgttttggagcaatatgaatcttcacggggattgacgattcttgtcggcaaaaacaataaacaaaatgagtacttaacgacaaaagctgccgcgagggatgatttatggttccacacgaaagacattccgggttcccacgttgtgattaaaagcagcgatccggatgaacaatccatactggaggcggctgcgatcgccgcttatttttccaaagcgaaagattccggctccgttccggttgattatacaaaaatcagacatgtgaaaaagccaaacggcgcaaagcccggatttgtcacctatgacagccagcataccgtatttgtcacacctgatgccgaccttgtcatacggctgaaaaaataaacgcacctccaagctgaaacccgcactcggcttggaagtgttttttattacgtataaacggagacgaaactctcccagccgtcagaaccgatctttacagtatctgatcagtttcccgtcatgtctgcatgatccgccgggccgtctgtgatttaaacggtcacacctgatttggcggcggatactttcaccttccctcgccgaacctgagcacatccgggcgggtctctgacctttcctttgtatgcgggcgaaatccaggcggcatcgggatcacatacatattccgcatcacttcgcaatcctgaccgcttgtcggcatataccattcaaactgcccgctttcgttttgaatttttcacattcggcggactgtcaggacagtataaaaaacaccctgcctgatgacagacagggtgttttttatggtcttcttcttttctcaaataatcgatccacttcttcagccaaatcagcagtaatgagaggctttatgtcctcagccagtcttttcgtatgtgcagggcttgcgccgcttgttgatacggatacttgaatgcgccctttgcggatgatcttcggcatatacacgctgccccgttcagcctcgcttacacaattgaccagctgcgtttcagaagcgccctcggttatctcccgattcacgttgcggtcatttgtcgcggcaatgatgaaaaaagcgggcgcgagatccttcatgtcaattttacgggaaacccagcggatacgtccttcatccgccagctgtttaatttcaggcagggcatcgggactgattacagtaatatccgcgccttccgaaagcactgttttgagtcttcttaaggcaacattgcctccgcccgcgatgacaattctttttccgctgagattaatgtgcagaggcagcatactgtccccccttaaaatcaaactgcccgccggggtttcggacagcttccgtcacacggttcaaaaacgcctgcttaatatgcgggtgaaaacctaagtatgaagcgagatgaacattttgattgaccgtttgaagcttttgaacttcccgttcaatctcagtcattaaaagcccggtaaacagaagatatggaacgataaaaacgggtgctccgtcatcctcttcaaggccggcaaacacttctttatagtgcgggtcacatgctgttaaaaaacaagggatgacttctttaacaggtgtaatcgcctcaagttttccggcaatctcactgactgcgcttttaactgccggatctgtgcttcctcttccgatcagcaccactttcgcctgctcaatggacactccggtatcttcaatgcgatgatgcacggcttttacgacttcatcgtccactccgatcggaacaccatatgtcacttttatatcgggatgcagggccgccgcacgggcgatttcagccggaatgtcatgtttcgcgtgggcagcggtcaacagcagcaaaggcacagccgcaatatgagtggcgccttgtctgacacaagcttcaaatcccgcttcaatagacggttcctgcagttctaaaaaacagatttcctgaatgggagcgtcagcgtgtggcatgcacccttttaaaaacgccgccgactctgtctgcgcttttttcagcctgcttccgtgtccgatatataaaatcgcctgcttcatttacaacgcctcgctcaaatccggatttttctgatcagatgcataccagtccagtatgcagtgataattgacgacatcaccgataacaattaaactcgggtttttgatttcttcttttatcactgtgtctgaaagcgtgccgacggtgcagacgactgttttttgcctgtccgtcgtcccccaatgaataaaggctgccggagtgccgccgtctctgccgttttccagcagcattctttcaatctgccggatatttttaattcccatataaatcaccagcgtatcaatgcccgtcgccagcgctttccatttttcttcaaagtcgtcttcttgtttataatgccccgtaacgaatgcgacattggagctcgcctctctgtgcgtcaccggaatgccggcataagcagcagccgcgattcctgatgtaatgccgggaacgatctcaaacggaatggcgttttgcgcgagagcctccgcttcttcgcctccgcggccgaaaacaaacgggtcgccccccttgagccttacaacggttttcccctttttcgcatacttcacaaggaaacggttgatcgtatcctgtttcataatgtgaaaatccgggagcttgccgcagtaaatcagatccgcttcttctccggcgtactgtaaaatctctttgtttaccaatctgtcatataatataacgtccgctttctgtatggctttcattgccttcaccgttaataagtccggatctcccggaccggctccaacgataaatactttccccatagcatgtctccccgatccgttttgaaatcttcccagaacagccgcgaggccgcacttcagctattttaccatatcccgccattgcgggggatatccggctgattgcgcggcctttttggacctattatgctaagctgtttttcacaaagtcaaccagtcttccggtgcattcttcacgttcaaatttgcctgaatcaagtacgagctcaggcgctttcggctcttcatacggtgagtcgatccccgtaaagaacggaatttcaccatttcttgcttttttatataaccctttcggatcgcgcttttcacatatatcgaggtcgcatttcacgtagatttcattaaattcgccctctgccacaagctctctcacctgatctctgtcctcacggaacggagaaataaaagccgtgatgacgatggttccctgctgaacgaaaagcttcgccacttccccgatgcggcgtatattttccttgcggtcatcatcggaaaaacctaagtccttgtttaagccgtggcggatgttatccccatcaagcacaatgacttgatagccttgttcaaacagctcgcgcgctgcggcgtttgcaattgtggatttccctgaaccgcttaagcccgtcagccagaggatagagcttttatgcttgtttttctgctggtattcttctttcgttattgaggcttcatgccatacgatatcacgatttgtcactctattttcctccttaagaaacgcctgcttcttctttcgttttcagccctttaatcaacacctcgacaacttcaggacggctgaattccgccggcggcatgacgccgcttcgcagcatttctctgacctttgttcctgacagaatgacgtggtcttctctgtcatgcggacatgttttggccgttcccatgttgccgcatttctggcagaagaagctgtgctcgaatttcatcggtgtaattccgagttcatccgctgtaaattgatcaaacagctcttgcgcttcatatgtgccgtagtaatcaccgacgccggcatgatcgcggccgacaataaaatgcgtgcagccgtagtttttgcggacaagcgcgtggaaaatggcttctctcggccccgcataccgcattgccgccaaaaacacgccgaggaatacgcggtctttcggataataatgatcgagcagcacctggtagctttccattctgacatccgccggaatgtcatctgattttgtttcaccgacgagcgggttcaaaaacaggccgtcaaccgtctcaagcgcggttttttggatatattcgtgggcgcggtggaccggatttctcgtttggaaaccgacgatggttttccagcctttttcttcgaagcttcgtcttgtatcggcaggttcaaatgtaaactcaggaaactgctttgacgcttttttaattaatgtgatcggcccgccgacatacgtatcgccgcgtgaaaataattttttcacgcccggatgcgcggcatcatcggttttatatacgtgaacggcttctttttgtttatccggcgtataaatatcttcgatgtcgacgacgccgtatgtttctccgccgtaagtcagtttcaccgtgtcgccgacggcaagctcagccgctttttctgaatcgaccggaagcgtgatcggcagggaccagacaacccctgatgctagacgcatattttcaacgactgatacgtaatctttttctgtgaaaaatccttcaatcgggctgtaccccccgatcccgatcagctctaaatcagcgaacgaaatcaaatcaagctcaatttctttgtggacggatgtaagatcatactgctcattcacccgattaattaatgttcctccgtgcggtgctaaactcataatacatgattcctcccagttaacagataaataaactcagattaatagttaaatgcccccgccttgttcatggacagagcgtttctcttttcggatggctttcatcagactggcggctccgccagctgccaaaagcacgctggccatcataaagatggaatagtaatctccttttaacagcagggagacaagcagatacgaaatcgacagtgacaaaaacggcgaaacaacccatactttgagcatcgttttcacgacttctttatgaaaaacgttcggcccgtttttggccattccgataccgataattgatgatgatgtgacttgcgccaatgggaccggcagaccgaagacggaactgataatgacaagccccgcaccggttcctgaaagcagtatgccttctccggctgaaaacctcgtaatctttttcccgttggtttcaagcactttgcgtcctaaaagcagagcgccgagagcgacaaagatgcctccgtacagcgttccttttgacacgctgagtacgcccgcagccaccaaagggcccaccgcatttgcgacattgttcattccggctgaaaaagcttcccaaaaccccgcaaaaagcagcacaattcctaaaatcttctgtttccgtttcgaaatgactcgaatattcagagaactgaataccttcgatacgagaaaagtgaaacagaacgcgacgaacggtacgagcacccaaaaaatcacgatgaccaaaagatgctgtaaaaacaatactttgtacgcgacgccgacaccgacaatcgccccgacagtgacctcactcgtcgacagcggaatgccgagcacattcgccgtgaataacgatagcgccgccgctccgattataatgcagacaatggtgagcgtaatggtttgttcgggaatgattccgccgctgatcgtcttaacgacttcaccgccgccgataaccgcccctgacaggactccggccgcgcagatgatcagcgcatacgttttctttttaacggcgccggacccgtaagcgactcccattgatgccgcggctccgctggctccgatattcatggcaaaaaacagacagaataaaatagcggctaattccatcgggcagctcctttattcatgcagtccgcattctgttttcgccatgccgttccatctgccgctccgcaaatcttccgcggtaaacgcaggtgaagtgcacggttcacagccgatgctcggatacccctgatcatggaggatattgtaatccagctcatgcttggaagtatatctccagatgtctttccatgtccaatggatcagcgggcatactttaatcgattgaaacttgtcgtctttattcaggaaattcgtattcgcccggctcggcccttgatcccggcgaaggccggacagccatgccggatgccctgcgagcgcttctcttaacggcagaatttttctgatgtagcagcactggttcggttctctttcccacagtttatctccgtgagcctcggcctgttcctcgagagtaaggctgggctttttcaggataatgttcagccccggataacgttctttcactttttcgatcgtttcatatgtttctttaaagtgaagacccgtatcgagaaacacgatttccgcgtctttctttactttagaaattaaatcgatcaggacgatgccctcaatcccgaagctgcacgcgtaaacaagctggtctccgtagtggccgtatgcccattttaaaacggacagcgcgcctttataggaatcgtcttccggaaatgtaatcgccggttcctcccatgtatcatacgttagcattttttctttcctcctcccggagacaatcaaacagttgttgttctctgccggttgtcttatccctcaatctttttttcatataaaaaactttcaatccagcggaatgaaagacagtgacccggtatagcccttatcttcaaaatgctgtgcatttttctggatgcggcaccttgcaatacacgcaggttgccgggcgtcatcggtccagtccctcagccgctcttgataagctttttagatttgtactaaattttagcacaattctaacagaagtcaacccgagttttttgataggaataataaaacaggccctgaggcctgtttttattgtcattattttttaaaccaatcttttgactcgggattcagtttccatgatttcagtttttcaatgtcagctgaatgaatcgtaccgttttcaagcgcgacttcaatcagcgtgtcataatcggttaacgagtaataaggaagacccgcttttttaaaggcttctgttgctttcggcagtccgtatgtaaaaatggaaatgacgccgaggacttccgcgccctctctttgaagggccgccgcagcttcaagcacgctgcctccggtagaaatcaagtcttcaatcacgactgttttttgtcctttcttaatggcgccttctatttgatttcctttgccgtgcgctttcggtttgcttctgacgtagcacatcggcgcgcctgtacggtctgcgagaagcgcagcatgcggaatgcccgccgttgcagtgcccgcgatcatctccgcctcggggaaatgctccttcagcagtttgccgagcccgtccgccacatcatttctcacttttggatacgacaatgtcagacggttgtcacaatagatcggtgataaaatgccgctcgcccacgtaaacggctcattcgggcgtaaaaagacagcttcaatgtgtaatagatgttttgcgatagcctgtttcatcggcgaacgccctcccattccagtttaattgcttcatatgctttaacggggttttccgcttttgtaattgagcggcccacgacgatggctgacgaaccgttttctttcgcaaatgacggagtcgccgtacggacttgatcgtcagctgcgtcactggcggtgcggatgcccggcgtgactgtcagaaatgaaggccggaccgcttcataaatggcttttgtttcatggaccgaacataccactccgtccagcccgcactcttccgccattttgccgtaatgcacaaccgtttctaacagcggcttatgcagcagaagctcttccttcgccacctgctctgaagtgctggtcagctgagtcaccgcgattaaagacgggcgttttctgcctgccggcgtgccttcttcaagcccctcaagggccgcgcgcatcatgcgtgcgccccctgccgcatgcacattgacgagatcaacgccgaggccggccagccgcttcatcgctttattgaccgtagtcgggatatcatgaagctttaaatctaaaaatatatcacagttccgttcttttaattggtgaatgatggcggggccttcctgataaaaaagttccatccccgttttgacaaagagcctttccttttcaaacaagtctaaaaacgttaaagtctcttcccctgatgcaaaatcaagcgcgatgatgggcaggttgtttttcatgtttccagctccttccgatgcattcacttacagattgaaagccgtgttggcgcagcacgtgggggagctgttctatgatttccgggcagacgaacggattgacgaagttcgccgtgccgacggcaaccgcactcgctcccgcaagaagaaattctaatgcatcctctgcggtctgaacgccgcccatcccgataatcggaatttgaacggcctggctgacttcgtataccatccggatggcgaccggtttgatcgccgggcctgacagtccgcccgttttatttgctaaaatcggccggcccgtcttgagatcgagcctcatcccgatgagagtattaatcatcgtcagaccgtcagcaccggccgcttcaatcgctttggcaatttcggctatgtttgcgacattaggcgaaagcttcacatacacaggcactgcggaaacttctttcaccgcttttgtcagttcggccgccatgacgggatcagtaccaaaagcaatcccccccgttttgacattcggacatgaaatgttaagctcaagcgcatgcacattcggcgcttggctgatgtgctcggccacttctttatagtcgtccacctgagaaccggcgacatttgcgataatcggcgtgtcaaattgttcgagccaaggcagctcgtgattgagcacatgctcaaggccgggattttgcagtccgatggcattcagcattcccgcgcttgtctccgccactctcggcgtcggatttccgaagcgggcttcgttcgtcgtggctttaatcataatgcctccaaggcatgataaatcgtaaaatccggcatattctttcccgaaaccgaaacatccggaagcggggatgatcgggtttttcaattggagacccggcagattcacctctaacattacagcgccacctcctcagctttaaataccggcccgtcaaggcagacctttacataggatgtatcgctttcacccgtgcggcacacgcaggcgaagcaggccccgatgccgcagcccatccgctcttccatcgaaagataaacctctttatggccgtactgctgcttcagagctttcagcatcggtgtcggtccgcagcttagcaggacatcgaattcgagctgcttttcacggatgatatcggtgacaaatcctttctctccatatgttccgtcagccgtcgccacataagtgtctccgtacgcacggcattcctgttcgtaaaaaacatcctttgctgattgaaatccaagcacatgaatgacgtttacgcctttttccgtcaggcgctttgacagttcctgcaaaggcggaacccccactccgcctccgactaacagcgcggttttgccgggttcaatccgccgcacgggaaatccgttgccgagagggccgagaacgtctattttgccgccctcttttttcccggacaaaaggcgcgttccctcaccgtcagctctgtagataacggatacttcatccgcggcgaaattgacgtccgcaatgctgagcggtcttcttaatagcggtgtgaccgcgtcactcaccttcagatgaagaaattgtcccggctcggtaaggtgccggacaagctctcctttcagcaccatcttataaatccggtcggcaatttctaagttggattgaacagtcaaatgcgcttttttcatatcgtgactgccgccttttgattggtttcggatgcaggcatatgatccgcccggaatgtcatgctttccaatacccgcaaaatggcttcggccgtatctaaagatgtcaggcaggcgactccgttctcaacggattcgcggcggattctgaagccgtctctggccggctgtttgccctttgtcagcgtattgatgacaaattgcgcttctccgtttctgatcacatcgagcagatttttcccttcttcgccgattttcccgacgacttgagccggaatctgagcgtctttcaaataagccgccgttccttccgtcgccaagattttatagccgatggcgtggaaccgcttggcgatcagcagtccttcttctttatctttatcagcaacggtcaacagcactgaaccgtagttcgggatttgaatgcctgaggcaatcagcgctttatagagcgctttttccaaggttgaatctttgcccatgacctctcccgtcgacttcatttcagggcctaacgtgatatccactcttctcagcttcgcgaatgagaagacaggcgctttcacgaacaccccctgctgttcaggctgcagcccctcttgatagccgaaatcagcaagcttttggccgagaatgacctttgtcgccagattcgccatcggaatcttagtgattttgcttaagaacggcacggttctgcttgaccgcggatttacctcaagcacatacacctcaccttgcgaaagtacgaactggatgttcagcaacccgatgatgttaaggccttttgccaaggcaacagtgtattgttcgatttttttcttaatgtctccgcttaaagactgaggcggatagacggcgattgaatcccctgaatggacgccggcccgctcgatatgctccataatccccggaataacgactgtttcgccgtcagatacggcatcgacttcgatttctttccccgtcagataacggtcgattaacaccggatgctgcgggttgattttgaccgcatttttcatatagtgaagcagttcttcttcgtgatagacgatttccatcgcccggccgccgagcacatacgaagggcggacaagtaccggatagccgatggatgcagcgattttgaccgcttcgttcaccgacacggcggtttttccgagcggctgcggcacattcagcgcctcaagcgcctgctcgaacttatcccggtcttccgcacggtctaaatcttcaagtgatgtaccgagaattttgacgccgcgggcgctcaattcttccgcaaggttgatcgccgtctggccgccgaattggacaacaacgccttccggctgttccaaatcaatgatgtgcatgacatcttctaccgtcagcggttcaaaatacagtttgtctgatatgctgaaatcagtggacaccgtctcagggttgttgttgataataatcgcttcatatcctgcctgcttaatcgcccagacagagtgaacggtcgcatagtcaaattcgacgccctgtccgatgcggatcgggccggagccgaggacgacgacgctttttcttgatgttacctcagactcgttttcttcctcatatgtgctgtagaagtacggggtttctgattcgaattccgccgcgcatgtatccaccattttatatacaggcttgatggctgcttcttttcgcatttgatacagctcttgttccggcatattccattcccggctgatatatttgtcggagaaaccgagttccttcgctgtctgcaggacggcgaggctgcctttttccgctttcagctcggtttcaaaagcgaccagcttacagagcttgtgcaaaaagaatacgtcaattgcggaaaactcatgaagctgctccactgtgtagcctcttctgaacgcttctgcaagataaaacagccgttcatctccggcctttctgatccgtttttccaaaagcccgtcagaaatctcttccgcatccttcagttccaggtgatagacatcggcttccagtgagcggaccgcctttaacagcgattcttcaagggtgcgtccgatggccatgacctctccggtggctttcatctgcgtcccgagcctgcggtttgccgactcaaatttgtcgaacggccagcgcgggattttagaaacgacatagtcaagcgcgggctcaaaagccgcatatgtttttcccgttacgggattcatcatttcatcaagagaaagcccgactgcgattttcgccgcaagctttgcgatcgggtaacccgtcgcttttgaagcgagggcagatgagcggctcactcgcggattcacttcgataatgtaatattggaagctgtcgggatcgagcgcgagctgaacattacagccgccttcaatgccgagcgcgcggatcagctttaatgaaacattgcgcaaaagctgatattcccggtcgctcaaagtctggctcggggcaacgacgatgctgtcgcccgtatggatgccgaccggatcgatattttccatgttgcagacgacgatcgcgtgatctctgctgtctctcatgacttcatattcgatctctttgtaaccggcgatgcttttttccagaaggcactgatgaacggggctgagctttaatccgttttcgacgatctctttcagttccgcttcattcgagcagatgccgccgcccgttccgcctaatgtgtaagcggggcgcacgataaccggaaacccgatccggccgacaaattcctcggcttcctgtaaagtgcggatgatctcactttccggcaccggttcattcagctcattcatcagcgtacggaataagtcgcggtcttcagcctgctggatggcggacagctttgtgccgagcacttccactccgcattcctcaagaaccccgagttcagacagctcgacggcaagattcagtccggtctgtcctcccagagtcggcaggatggcgtccggccgttcttttctgataatacgcgtgagaaactccggcgtcagcggttctatgtatacccgatcagccatttccgtatccgtcataatcgttgccggattcgagttgacgagaatgacttcatagccttcttcctttaaagcgagacacgcctgtgtgcccgcataatcaaattccgccgcctgtccgataataatcgggcctgatccgatcactaaaatctttttaatatctacgcgttttggcataccgcttccccttctttctcagttgtttcgatcaagtcaatgaatctgtcaaataagtgattggcgtcttccggtcccggtgaagcttcagggtggtactgaaccgtaaatgccggcaatgttttatgcttgagtccttcgatcgtttgatcattgatcgcaatgtgcgtcacttcaagctctgtctcatctattgaagaaactgtatatccatggttttgggctgttaaagcgactttccctgtcgcaagctctttaaccggatgattggaacccctgtgtccgaatttcattttttccgtttccgctcccgatgccagcgcaaataattgatggccgagacagattccgaataacggcaccttcccgagtatgccttttatcatttcaatggcttccggcacatctttcggatctccgggtccgttagaaagcatgatgccgtccggcttgagctgaagcacttcttccgccgttacattgtacggtacaacgatgacatcgcattttcttttgtttaactctcttaagatgccgtgcttcataccgaaatcgacgagcacgatgcgtttgccgcggcccggactcggatatgccgttttcgccgatacttgagcgacttgatttctcggcagttccgtttctttcagccttgcaagaacctctccgacattctcctcacttgaagcaaacgttccttttaatgccccggccgtgcggatcattctggtgagttttcgcgtgtcgatcccttgtaagccggggatttttttcattttcagatactcatcaagcgtgtaagctgagcgccagttggaaggcagctcgcacagttcttttacgatcagcccttttacaaaaggagtgatagattcaaagtcatctctgttaattccgtagttgccgatcagcggatacgtcagcgtcacgatctgcccgcagtaagaagggtctgataaaatttcctgataaccggtcattcccgtgttgaatacgacttcacccgcggtatgctccaggctcccgaatgcttcaccctcaaataccgctccattttccagcactagtcttcttttcatttgacgagtctcccttcttcatatgcaagcttaccggcagccatcgttgcaacaggccagccgaagcacttcatcttgttgaatggcgtattttttcctttagataaaaatgtatctttgtcaatggccgcttctttgtccagatcaattagggtgatgtcagccggcgcccccggtgcaagcgttccgtacggaagaccgaatgcctcgcaaggttttaccgtcatgaaatcaaccagctgcttcagcgtccacgtcccgtttttcacaaaatgtgtgtacagaaggggaaaggcagtttctaacccgacaataccgaaaggcgcaagcttcatgtccgtgtttttctcttcttctgtatgcggcgcatggtcagtggcgatgaaatcaatcgtgccgtctaaaagcccttcaatcagcgcctctctgtcctctttgctgcgaagcggcggattcatcttaaaattggtatcaagtcccgggatatcttcgtcacaaagcagcaggtggtgcggcgatacttccgccgtcacgcggatgcccgctttttttgcgtctcttacggctctgacggattctttcgtgctgatatgacacacgtggtaatggcagcccgccgcttccgccagcagcacgtcacgggcgatatgtaccgcttcacaaatggaaggtatacccttcaggccgttcgcttttgaaaaagaaccttcatgcacgctccctccgtaaataagtgagttatcctcacaatgagcgacaatcgctttatttattgaagccgcccgtttcatggcttcatacatcattccggccgtctgaactccgacgccgtcatcggtgaaggcgaatgcgcccgcttcatgaagcgcctcaaaatctgtcatctcttcgccggtttgtctgatcgtaatcgatgcgtaaggaaggaccctgacagatgaggtttctttgatcctgttttgcagccattccatctgctctttcgtatccggcaccggccttgtattcggcatggcggcgactgtggtaaaaccgccccgcgccgcggctttagagcccgtctcaatggtttcttttttctcgccgcccggttctctgaagtggacatgaaggtctacgagcccaggtgaaacgaacagtccctcagcgtcgatcaccgtttctccgtctttcgctgtcagaagcccggtttccgaaatgaattcacccgttacccggatatcatgtaccgctttttctccctgttcatttaatatccagccgtttttaatgagataagacataagccgcttctccccttttcacattggtttgcagtgctctttttaagactgccattctgatatacacaccattttccatttgtttaaagattcttgattttccgcattccactaatgttgtgtcaatttcgactcctctgttcaccggtgcgggatgcatgatgatagcatgccgcttcatgctctgcgcccgcttttcggtcagcccgtatgcttccaggtagcctttttggtcggcttctgtctgatgcctttcattttggatgcggagcagcatgacgacatctgaagcttgtatggcctcatccgtctgaacacaggtgccgaaggcgtttttctcatcctgccactgcggcggcccggaaaacagcacacgtgcgccgagccttgtcagcacctcggcatttgaccttgccactctgctgtgtttgatatcgccatgaatggaaaccgtcaggccctgaaaggtctcaaattcctcttgaatcgtcattaaatcaagcaatgactgggtcgggtgctgtccgcagccgtctcctgcgtttaagaccggaatattgactctgccggtcagatctttgtaatattcatccgtgctgtgcctgatgacgcaggcgtccgctccgattgattccagtgttttgaccgtgtcgtataaggactcgcctttttgaacgcttgtgctcgtgccgtctaagctgagcacgttcatcccgagtttcttttccgccacttcaaagctgaaccgcgttctcgtgctcggttcaaaaaacagattcgcaacgaattttcccgcgagatcgggacggactgcaccctcttttatcgcttttgcctctcgcagcagttctgtaatttcagccgcgctcagttcagacatcgccgttaaatgattcatgttttttctcctccgtttccgcttgaaggccgtaaaaaacaccccggtctatagactcggggtgcggttaaagagagaagagccgtacagcgtcttcccgttataacccttccaagcctctctggactttctttaaaaggtttacatatgatttagtttttccgatgcaatcgcgtcttcttcatttgcatgcggcaggataaggttcaggatgactccgacgattgccgcaagcgccatgccggatatttggaacccgccttttgatacttgaataaaagcccctccgacgccgatcacgaggatgacggatgtgataattaaatttcgcttgttttcataatcaatgttgttgtcaatcagcattctcaagccgctggaggcaatgattccgaagagcaggaaggaaacgcctcccataaccgcggacggaacagagctgatcagcgctgaaactttgccgataaatccgaagcacagcgcaatcactcctgcgccgccgatgacaaagacgctgaaaactctcgtaattgccaggacaccgatgttttcgccgtatgttgtcgtcggcgggccgccgattaacgaagcgataatcgtcgctacgctgtcccccattatggagcggtgcagtcccggctttttaataaaatcctgtccgacgactttactcagcaccatttggtggccgatatgttctgacatcgtcacgaaagcgaccggcaccatcgcagcggcaatgcccaatgtcactgacggcgtgtagtctttgaaagggatgataaattcaggaacggcgaaccattttgcatcaatgaccggctgaaaattgacgatgccctgtgtcagcgcaaacagatatccgcctataatgccgatcaataccggaatcaagcttaaaaatcctcgtaaaaagatggcgcagataatggtgatggccaaagtgacgccggctacactgaaatgtttcaggctgtaaacgagttccttcgcattcggatcagcatacattgccatattgacggctgtgcttgccagtccgaggccgatgacgatgatgaccggcccgacgaccaccgggggcagcagcttcatcagccaccccgttccaagctgcctgatgagaagcgcgatcaggccgtacacaattcccgccaggaaagcgccgaccatggcagcccccggccctcccgtcgccttcaccaagataatcggtgatataaaggcgaatgatgagccgagataagcgggaatctggccttttgtcaccaagagataggcgagtgtcccgattccgctcgtgacaagcgccactgccgggctcattccgaccagtttcggcacgagtatggttgaaccgaacatggcgaataaatgctgcaggctgaatgacagccaggacaatggattggggacgtccctgactcccaggtttacttttttcttactcatggcgttttcctcccggttgactttcaaatggtataaaaaaacctctttgctttttgcgcaaagaggcatacaaagcccggccgtgtcgatccgcccggctttgtgttttaaaatcctctttgcaaactctctggaatgcatttaaaaagggtggttattcattttcgtaaatggcgaccatatcagtctgatcaacttcgctcagctgaaccatcactttttcagcttttgaggtcggaatgtttttcccgatatagtccgctctgatcggcagctcccggtgtcctctgtcgacaagcacggcaagctgtatcgatgacggccgcccgacatcaacgagagcatccatcgcagctctcaccgtccggccggtataaagcacatcatcaaccacaatgaccttttggtctgtgatatcggccggaatgtccgcgccttttacaagcggctcttcattgctcgttttttttgtgagatcgtcacggtaaagggtgatatcgatttccccgacggtgaccggatttccttcaatctgttcgatccgctcggccagccgcttcgctaaataaatacctcttgttttaatccctacaagaatgcagtcattcattcctttattccgttcgatcatttcatgggctatccttgtcagcgcccttctgatggcctgttcgtcgagaataacagctttttgattcaatcgtgacacctctccattcgtatataagaagaaaaaacccctcctgccagagcatagaggggttcctttccaggaccaagacacacgtgtatctcttctgtcctatccgttatccttctcagcctctctggactgtgttaaagaatctattcagcttgtttttattatttcagaaaagaaactcgctgtcaatggctatttctcaaatgttcaatgagttttttcatatcttcaggaaggggcgcttcaaactccatgtattcgcccgtccgcggatggtcaaaacctaatattccggcatgaagcgcctgaccgttgaaatcaatggtttttctcggtccgtacttcgggtcgcctgccaaaggaaatccgatatatttcatatgaacacggatctgatgcgttcttccggtttcaagacggcactctacgagcgtgaagtcttgaaaacgctcaagcacgtggaaatgcgtgacggcgtttttgctgctttctcttgttacggtcatgctttgtcggtcttttttatctctcccgatcggagcgtcaatcgttccgtcatcatgtgaaatcaacccgtggacaaccgctgtgtactttctcgtcacggttttattgacgagctgattaacgagtgattcatgcgccatatcgtttttggcgaccattaacaggccggaggtatctttatcaatccggtggacgattcccgggcgcatgacgccgttaatgcctgaaagatcgttgcagtgagccatcagtccgtttacgagcgtccctgtcacatggccgggcgccgggtgtacgaccatgccccgcggtttgttcacaaccaagacatcctggtcttcatagtaaatgtccaaatccatcggctctgcaagcacgtccaattcttccggttcaggaatggtgacgtttacctgatcgccgggctgcattttataattcgcttttacggatttgccgttaacggataccagtccctcttttacccattgctgcacttgagtgcgtgaccagttttctcccgttgaagccaaaaatttatcaatccgttcgctcttttgttcaggctgaacggttatctcaaattgattcatgttattgctccttctttttcccgctgtcaaacagcatatgaataaataaaagtattacaccgacgcacagtgaggagtccgcgatattaaaaatcggatagtgataatccacgatgatgacatgaataaaatccaccacttcctggcgcgccgcccggtcaataaagtttccggccgcacctcccagcattaagccgagagaaattccgagtaacatctgcccttttgcataacgctgtatgtaataaacgattccgataatcacggcgatggtaatgacgtagaaaaaccacatttggccggctaaaatcccccacgctgctcccgtgttgcgatgagatgtgatataaagcacctggtcgatgacaggtatgctttgtcccaattccatatggctgacgacaagccatttggtcaattggtcggcaataataataaaaagagcgataagataataaagcacacacgttcctccagtatacagttacttttatcctttatgaattttatcagtaaaagatgccggagtaaaggcagatcataagcgtatgcaaacagacgctgtcactcatacagcgcctgatcatatgcataatctccggttacccagtatggaagggttttcttttcaaattgagcgggataataaaaatcatcagcggttctggccgtcggcagcaccgcaagtttttcaatcggaatgggggcgcctgttttttcacaataaccgtacgtattgttttcaaacttagacagggcaagaagaacatcctgaagttcttcttttatatgatagatcagagttgcttcttggtcgttcattgaaggttcaacagatgctgacatttgaaagcaagaatattcgaataatcttgattgaagttcttctttcatcatgagaagctccgtgtggattgcggtcagttgatcattcattcatcacaactcctgctcttgatgttatagctttattgttgccctcagagcgctatttgaagcccataagaattttcctgccgttctaatcgatgacattgctggcatgtaaaaaagcgcccggctgacaccgggcgctttctcatttattatttttgataatatttttcaacgatttccgcattgcgcagtgataatgtcggatatttcggattggctccgacatctttagaaattacgcgggaacgctcacacatctggccttccgctttttctacggtcatttttcctgttgtaaagctttgcgcgttttccggcgcttcactttcgtcttttactgtcagttctgagacgataaacagctgcgcgatgttttctttaatggatgacaagaggtcgcggttttctttgttcggatacaaagtaaggctcgcttccaatgatcttccgataattttttcgttacgggctgtttccaaagctttcagcacgtcgtttcgaagctccatgaagcggtcgaatttttcttctgtcgcctgactgtccggaacagcaatggtttccggcatatctgtcagctgcacgctcgcttcttcaacaaatgataagtgagaccacatttcatccgccgtatgcgggagaatcggcgccgtcagtttcactaacgccagcagcgtttcataaaagacggtctgcatgctgcggcggtccggatgatccgcatgctcgatgtacacaacatcttttgcaaaatcaagatagaaggagctgagctcgatcgtacagaaattgtgaatgctgtgataaacaaccgcaaattcgtattcatcgtacgcttttttcaccttatcgatcagcttattcagcttgatcagcatatattgatccacttcgcggagatcttttacatccacggcattgatgcttggatcaaaatcgaacaggttgccgtgaaggaagcggaacgtgttgcggactttccggtatacttccgcgacctgcttcagaatatcttcagaaaccgggtgatcggcctgatagtttacggaagatacccataaacgcagaatttcagctccaagctgttttgcgatttttgtcgggtcaatcgtattgccgagtgatttactcattttacggccgtttgcatcaagtgtaaatccgtggcttaatacgcctttatacggcgctttgccggtgactgcaacagcggtggaaagagatgagttaaaccagccgcggtattggtcagagccttcaaggtataaatcagccggacggacaagatcatctcgttcttcaagaacggcctgatgggaagaacctgaatcaaaccatacatccataatgtcttgctctttcgtgaagattccgttcgggcttcccggatgtgtaaatccttccggcaggaggtcttttgcctctctttcaaaccatacgtttgagccgtgctgtttgaacagctcagacacgtgttcaatcgtttcgtcagtgatgatcggctcaccgttttctgcataaaataccgggatcggaacaccccagacgcgctgtcttgagatacaccagtcaccgcggtcgcgcaccatgttgtaaaggcgctgttcgccccactccggcacccacttcgtttgtttgatggcatcaagcagatcggatctgaaatctttaattgacgcaaaccattgcgcagtcgctctgaagatcgtcggttttttcgttctccagtcatgcggataggagtgtgtaataaactcgagtttcaaaagcgcgccgttttcttcaagcttctccgtgatcggtttattggctttatcgtaaaacattccttcaaagcccggcgcttcgtcggtcatgtttcctttttcatcaacagggcacagtacttctaagccgtacttttggccgacgataaagtcatcttccccgtggcccggggcagtatgaacacagcctgttccggcatcggttgtgacgtggtcaccgagcatgacgagtgaatctctgccgtacagcggatgttctgcagtgatgtattctaattctctgcctttatatgatgcgacaacttcaggattttcaaagccgcatgcctccgctacgttttcgatcagttcagccgccactacataacgcttgtctccaaccttgatgacattgtattcaagatcaggatgaacggaaattccgaggttggcaggcatcgtccacggcgtcgtcgtccagatgatgaagctttctccgttttccagaacgcctttaccgtctttcactttaaacgcaacataaatagacgcggaacgtttgtcctgatattcaatttccgcttctgctaaggcagattcacttgaaggcgaccagttgaccggcttcagacctttataaatatagcctcttttcgccatctcgccgaaaacgcggatctgctgcgcttcaaattcaggctgaagcgtaacatacgggttttcccaatcgcctctgacgccgagacgcttgaattgttcgcgctgtctttcgatctgctgccatgcataatcttcgcaaagcttgcggaaatcagcgacggacatttctttccggtttacttttttgtttttcgtcagcgccgtttcaatcggcagtccgtgcgtatcccagcccggcacgtacggtgcgttgtagccgctcattgatttatagcggacgatgaagtctttcaggattttgttcagggcatggcccatgtggatgtctccgtttgcataaggaggtccgtcatgcagcacgaatttcgggcggtctttcgtccgttcttgaacaagacggtaaatgtcctgctcctcccagtctttttgcatgtccggctcacgattcggcagatttccccgcatcggaaaatctgttttcggcattaacagcgtatctttgtaatccattttcattcctccacaacatttttcagaaaataaaaaaagccctctcatcccataagggacgagaaagcttatctcgcggtaccacccttttagaaaaaacggatcatccgtcttttcctctcgaacatcgtaacgtgatggaacgtcctttcctactctcggttcagaaaggaaactaaagggctgatctgcatgattccggccatcccgggctttcaccttccccggttcgctttatagcctgttttgagtcatgccggtccctttcaatcgtcttttcatctgaatttatgaacgtattatattcgaacgggccgaagaatgtcaagaaaatcagaaaattattctttttcctcaaataccgcgtcgacttcgtattccagcagatgatcccaatcatcgttcttcagcaggtcgagctgcgcttcaatcagcatttggaaacgtgttctgaagactttagactgttttttcagctcttcgatttccattgcgatttttcttgatttggaaagcgactcattgatgatgcgatcggcatttttttctgcttcacggacgatcagcttcgcttctttctgcgagttgcgctttacgtcttctgcggcttcctgggctacgagaattgatttattcagcgtttcttcgatattggcaaagtggccgattttttcgtccagctcgttcactttcgcctcaagctccgtttttttacggagtgcgatttcgtaatcttttctgacctgcattaaaaattcatttacttcatcttcatcatatccgcgaaaaccttttgtaaacgttttgttatggatatcattcggcgttaatggcatattgccacctccatttttacatttcagtacggttatctagttcacattataaaacaaatacggcacagatggagaaaaaaactgaaaaaacgactcatttttgccgttcaaatgtaactttccatttgtcttttttcgtttttccgtcaacttttgccaaactgcatcgtccgaagccgcgaatcgagagcatgtccccttcagcaacctgataagacggatcttcaatagctttccaattcaccttaacgagcccgtttttcacaagcgcctgcgctttctgccgggattgcctgctcattgaagcgcagacggcgtcgagacgcaatgaagaaaccgtgtcatcccttatttcgacatctgaagcgggaatgtgaagagcggaaagctcgattttctcaagctttaccggcgctttgcccgccttggtcagctgagtgctgacaaaatcggcgatttcaccggagacgatgagctgcacggcttcctctgagaaaatcagatcgccgtatttctgccgctttaagccgatccccattaatgatccgagaagagagcggtggtcaatgctgacgaatttttcagcgtattgaacgtcaaaagcccggagctcaaaatcatcctgttcaggttccatatattcagggtataaaatcgcgcgtttgcgctcagctctgtcatatcctccgaaaaacgcaagaccgcaggcgtcgccgataacggcttttacaatcacctgttccctgggatctaagaaatcagtcagcttcatccgatactggtccaggacaatctgtttccattcaagcacctgatcaataaaaggccgctcgtcttgtctgaagtgctggtaaatatcgctcatgttctttcctttctatgtaaagaggcttggctggtgccaagcccgtatcaaactgtcgcattcaagtatacattgcgatcatgcggtataggccccaaagtcccgtcgtggcaaaccgaagcacgataatcgctacaatcggggatatatccagcatggcaatgggcggaatgatccttctgaacggctctaaatacggttcgcaaatcgctgcgagaaaccgtccgaccgccgtttctctcgtactcggcacccatgacataaagatatagatgatcagggcaaacgagtagatgtaaattaaataactcagaacggaaaaaatttgataaagaatcatcctgctttaccacctctgatgttcgtcttcatttataagctccgaaatcgtgccggaaacgtcgacattatcaggcgtgcacagaaaaatatctgaaccgattctctgaatgtcgccgccgatggcgtagacggtaccgcttaaaaagtcgacgattcttttcgcctgatcatgctggatgcgctgcagattgacgacaaccgcccgcctgttctttaaatgatcggcgatttcctgcgcttccgcatatacacgcggttcactcaagaccactttagaggatttctgaacactttgcaagcttactacgttctgcttgccctgcggcttctgagcgtaagcaggctgtttatctttctgctgttcatgctcttcctgatgatcctgctccgtttcaatgtattcgtactcgtactcctcctcatccattgagaaaaagtttttcagtttatttttcatgctcatttgtttacaccccccggttcatttccgactaatgaagagccgattctgataaaagttgcgccctcttcaacagcgatttcataatcatttgacatgcccattgacagttcccggcacggcgcgtttgtctgattcagtttttgcacctgatccctcagatcacgcaattgccggaagcaggctctgatcgtttctgtatcgtctgtcaggggagccatcgtcatcaggccctctacagaaatgtttctaaactcagaaagctctctgataaaggggatgacctcctctgttttcaaaccgtgcttagacggctcaagcgaagtattcacctgcacaaaacagcgaaccgtatgctgcgcccgtttttcaatctcttttgccaatgacagtctgtctaaggaatgaatataagatacacggtcaacgacggccttcacctttctggactgaagactgccgataaagtgccacttcgggcttcctttgatgacttcctgcttatggataagctcggcatcccggttttctcccagacttgtaataccggcatcaacggcctcttgagccctttcagctgatacgtattttgtaaccgcgatgacggtaacatcttcggggcttcggcccgatctgttacatgcttcgtttattctttcgtttatatgtcgtaattgatcagcaacacgcaagatctaatgcctccttcattccgataaaggacatcatgcgtcccgttttccctttgtcgcggcggtgtgaaaagaatagttcatgctctcgttcggtgcataatccgctgactgaaatgttttcttccggaatgccgcaatgtatcagaagaagacggttgacctcttttaaatcaagctgatactggcctttttccgtttcgcatatggcggattcagccgtaaagggcagcgcccgcacttcattgatgacgcggtcgtcgactgtatagcttcccgcgctgatggacgaaccgatgacagcctgaatatctgttaaacgggagccttcttcgtttacccagcgttccgtcatgatgcgtccgatttgtttgaccgtccccttccatccggcatgggcagcgccgataatggatttcaccgggtcataaaaatacaagggcacacagtccgcaaaacaaagggccaaaaaaagattcgcatctttcgtgtagagcccgtccgtcccgcggaatgcggaagaatagtctctcgctccttttcctttatccccggctgtcacgcgccggacgcggttttcatgtgtctggtcggcgaacacccaggaatccagatcagtaccgcataaggacgctatgacttcacggtttgtcacaacatcatgagcttcgtcccggacgtgcaacccggtatttaatgactcatacggaggattgctgacaccgccgtttttcgttgtgaatccggcgatgacctttgtgttaagctgattcacacagttccagtcttctatcatgagtgccgagggggtggtaagactaaacgggtgatatgtattcatggagatccaacctttcgacaaacattaaaaaagcgtaatttcccactcattttaacacaattttaagcatacgtttagcggctgattgaaaaatgagataaataaatgtgccggaaacattgagatttccggctttttacaagtaaagggaggattacgctcccccctttggttcatttacacgcactaagatgacatcttccccaattttaactatatttcgccaaggaatgatcatttcctcttcttttccgaaaaaaccgagaacttttccgctgccgcctaaaataatcgcctgaatttttcccgttgtcacgttaatatcaatatccccgatgcttccgagtttttttccgttcgacacgtttaccacatcttttatttgaaattcagatatgctgatcatccgtatcacgccctttgcccgttctttttcctattatatgaacggccgggctgaaccttgtcacatcgggcaatcttttttgcggctgcaccagccgagaataaatctcagcatgattttcgtatagtccataagctcatcaacggacacttcctcgtttacggagtgggcgttttttaaatcgccggggccgtatatgacgctcggaatcccggcctgataaagccatcctccgtctgttacggtttgggaaacatcaatgacgggctcctgttttatgacggcagagtgtgatgcagccaagacagaaactgccggatgatccggatcgatttccagcgccgggaacacctctcctctgtcttcaatcatcgaagatccgccccatttgaacaccggcctgttttctttgagccacagatcactgtcagcgacacgattaatatagtcttcgatttctgcggctgcttgttcgtgcgtttcgttcggataaaagtggacggtgatccataaccggcattcatcggcgacaaacgctgcgtgtcttccgccttcaatgacggcggggttgatcgtattggtgccgggcgcaatgccgggatagcttttcgttaccgcccagtggcgctccagctctcccaaggcagtgatgattttcgccattttttcgatggcgctcgctccgaatgtgcctccgcccgcatgaatcatattgcgcctcatgccgtcatgaaatgtttgtttgcttttcaattctatccagccggtgatgacaccgccctgcccttgaatatgcaggctgctcgtatccgcgacaaccgcaaaatccgcgtgatagccgcgtttgcagcattccagcgtccccgcctcgccgacttcttctccgattacagactgtacaatgaggtcgcccggaagcttaattgcggcatcatggatcagcttcagagagaaaagaacacacgccaacccccctttcatatcagcggcgccccttccgatcagcatgccgtcttttacgagcggctgaaacgggtcagagttccaatcttcgcccccggcttctgccacatcaatgtgtccgtttaaaatcaggctttgatgcctgcttgaatctgtcccttttaaaacaccgactacattcggatcttccggatacacatcccacatatcgaccgagcagcccgtttcttttaaaaagccggccacccacttttgggcttctgccgtatttcttgctggcggggccggagtgggaaaggcgatcaacctttcagcaatatgtatgaagtcgtgcctccgtttctccgcctgttgtaacagcatatcaatctgatgcattggaaatctcccctttagctgtatcaaaaaacccgtttcattaaaatgaaacgggtaaaaaacggatcttcctccgcttttttcaccgcttccctccgccggcatgatccggatcaggtccgttaagggttgagacaacgtctctctcagccgcatggcagcacccccagggtgaattgatgttattttacggttgatgcctcttttgcacgtgttaaaaacgggcggccattgttccataagacattgacaggcgtatcgaaaaacgctgtaagccgctcgtcagaaagcatatccctgattttcccggaggcgaacacctcgccttgttttaaaagcagcgccttatcaaataccggcagaatttcttcagcgtgatgggtgacataaaggatggacggcgcattttctttttcggcgatcgacgtaatcgtgtccagcagctgctcccttgccataaaatcaagacccgtcacgggctcgtccaaaatcagcagtttgggatcagccataagcgcccgcgcaatcagcgctctttgtctttccccttgtgataatgtttcataccgcctgtcggcgtaactgatggcgcccaaatccttcagaagaccgatcgctttttcccttacctgctcactcggagtttcgtacagcccgattgaggcgtacgcgccgctgagggcgatttcaaaagcggagtccgcggcatataatttgtgctgaagacctgccgaaacaaggccgattttccttctgagcctgtcaccgagctctgttttgccgaactgatggccgagcacctgcatctctcctgaagtggggaagtaataagagcataacatattcagcaaagccgtttttccggctccgtttaatccgtacagcacccaattttcgtttttctcgacgcgccagttaatatctttcaaaatccatttcccgtttctttttaatgacacactgtccagctgtaaaatcattgccgtttcccccgtttactttatttaaattttctaaaaacttttacacattagaatacatcacttttttgcaaacgtaaaccatcgcatgaaaaaagcctttaaacaaggtttaaaggctttttccgttattgatggatattcttattcatttgtttaatggctgccttttcaagccttgagacctgagcttgggatatcccgatttcttcagcgacctccatttgggttttcccttggaaaaagcgctttcgcaaaatcattttttcccgttcgttcagtcttctcatgccttctttcagagccagctcctcaatccattgtgtatccttgttgcgctcatcgctgatctggtccatcacgtagatcggatcgccgccgtcattataaatcggctcaaacagtgaaaccggatcctggatggcgtcaagggcaaacacaatttcttcatggggcacttcaagaactttggcgatttcctctgctgtcggctccctgcttgtctcactgattaaccgctctcttacttgaagcgctttatatgcgatatcgcgaagcgacctcgagacgcggatcggattgttatcccgcaaatatctgcggatttctccgatgatcatcggtacagcgtatgttgaaaacttaacattatggcttaggtcaaaattatcaatggatttcattagtccgatgcagccgacctgaaataagtcatcaacatactctcctctgttgttaaacctctgaatgacgcttaagacaaggcgcagattgccgtttacaagcttttccctcgctgaatcatcgccctcatcctgcaattgcctaaacagctttctcatctcttcattcttgagcaccggtaatttggaggtatccaccccgcaaatttcgactttatttcttgacacgtttttccctcccactaggagctgctgtacaacgttaagtatctcctcgggtgggaaaaatatgcaccgctattttacagaaataaacatccggcggcggcaatccttgcagcagtaagggctgtcagatggaaaaaattttacaccattttgttaaactcttttctcagtcttttgataatccgcttttcgagccgggagatataagattgtgaaatccccatcatgtcggctacatctttttgggttttttcttcttctccgacaagcccgaaacgcagttccataatctgcttttctctttcgtttaattgctcaagcgcttttttcaaaagttttttatccacattggcttcaatgtctttcgtaataatatcatcatctgtgccgagcacatccgaaagcagcagttcgtttccgtcccaatcaatgttcagcggttcatcaaaggacacctctgaacggattttattgtttcggcgcaagtacattaaaatttcgttttcaatacatcgcgatgcgtaggtggcgagtttgattttcttttccggattaaacgtgtttaccgctttgatcaaaccgatggtgccgatgctgattaagtcctcgatattgatgccggtgttttcgaatttgcgggcaatgtaaacgacaagacgtaagtttctctcaatcaggatggcccgcgccgcctgatccccgctcggcagctttaataagagcacctgctcctcttctttagacaaaggcggcggcagcgcctcgcttcctcctatgtaatacacttcatcgcttttcagtccgagtttcatcagccatttataccacaaatatgtcagacgcagcttaagttttttcatcttcctcccccttctaaataccacgcgttttgagtatgatgaataacagacttttcgtcaggaaacatgttttacagccttccctgtcagcatcttcggatgaacgattccgtcaaattcaccgtcagcggataatggcttcgtgctgatgccgatcaggcatttttcacatgcgatcatctcgtcttttgttaaaatcgtgacgtaatccggctttaaacagagtaaaaattgattgtcctggccgacgcccctgtatggaatcagcctcagcttatccgcatggcggaacgaatcatcaagctgctctatcacttcaagcggactggcggatttgatgaagtccgtttccttttcgctgaggatcggagcgaatttgttaatgtgaaggatcatgaccggcgttttcgtcagcggatcatacagctgattcccggaatccaccaatcctttcgcgcggattgtctgtccgctgaattccgcctgcaccatgacaagttcatcgtactgaatggacttcgtctcgatgtcttcaattctctttttcgaaaaaaaccatatggccggaaatccgataactacaaacatccagctgatcgggtcgccgaatccggtctggcttgtaaccattacgccttgctgcacaattgattctgtctgcagcagggaatgtacgccgatcattcccccgccgacgagaaaagtcgcgaaataaaaggcgaacaaattttgaaaaaagtatcggaaccgtttaaagccaaaagccgtaagcacgatgactaccgaaaacgccatttttcccgccggatgctccacaaagggagaaataggcgtaaacatcagaagcacaatggctgacccgatgaaaccgccggcggccactcttctttttttcacctggcgttttaaaataaaggcggtcaataaaagcaaaagagaatcaaaacaaaagttcaacagccaaatgacatccagatagattttcacatctgacccctttcctcttttgtcttacatatctgtttctctctcttgtttcataagtataaagcaagctctgtgggaaagtctgtcaattaatgttgagggtaaagtacaatttttaagggataaccgttttatttgtcgagggccgaaaaggttgattttctattgtccccttcaactaaaaaagcgctgccgtgatttggcagcgctctgtttttactcattgatataaagttttcctttagccgtctgtctcgtttcatttccgtagtcatctcttgcgataacgtcaatttttgctccgcttgctttgatggaagaagccgccgtccagtaaccctcatatcgtcccggagaaatttctctcagcggaagctctgttgcgttttggctccctgcccgggcgtttgtcagaggcagacggatcacgaaggaagcgtctaatttctttccgcttgaaaaagcgattttcactgattctccggcttttaattccttatccgctccgggaaccaatccggaaatgacgggagcattgtaattgacatcgattaccgtctttttcgttgttttgttaccagcttcatctgaggccgtgaccttgatctcattgctgccgttttccagaagggttctcgcttgataagaaccgttatttacttcagctttttttccgttcacctttacccattttaaatgggcgtcgtgcacttttccttttacagtcactgcttctttatttgttttatcaccgtttgccggactgtcaatcgtcacatcaggcttatcctcatccagtatgaccgtgacagggcgtgactcgtcggttgacccgctgtctgtcacagatgccgctgtcagccgattgccatctttagtgagtgtgacaccggcctggaaactgccgtctgcatctgctttcgtttctgcggcggttttaccgttattggtaagacggacagcggtttttggtgaagccgttcctttcaccgtgattgacttcttgtttgtaaatgaccggttttcaggcgacgttatctcaggcacagaagcttcgtagtcgaccaaagccctgatcataaagtttccgtctgttttatcggcttttgaccagcggccgtcgaggtattgccagtttctgttcgagtacgggctgccgtcatcagatgacagggcaggtgtataaggatcgggtttcgtctgacggaacacaagataaaaatcctttccgaccgcgattccttttgagctgagatccactttggtccactcgccgtttcgaagcgcttcagcttggaacgggccggcaattttgctgcccggagctccatcagggccggatgcatcatatacttctgcttgaaattcggtaccgcccggatcaggccagtcggcgccccaaaatttaaaaaggcctcccgtcagcataccgtgttcttttccgtctttgagggtcatcttaacggcagatttgctgccggctttaaaatatgacagcgcggcttcttccgtcccgttatcataggcgatttccccttcataaccgacatacggcttaagcttgacgtttttttcagcatctcctttgatgtcgacagaaaattcgctattgtaaaagccttttgccgctactttgattgtgtaggagccttcatacgccttaagcgaatattcccctttatcgtttgtcaccgccggctcaattgcggcatcctcggccacataaagcgcagccccttttaccggttcgcctgtggactgattggtgatggttccttttagcgtgccggacggcatttgctccagtgtaaagtctgcctgtgcggttttgtctgattgaatagaaacttgtttcgaagcggacttaaatccgtaagcctcggctttcagcgtatagcttcccgccttatgtgacaggctgtaacttccgcttgcagggtcggaatatacggatttccccgtctcggcgacactgatttgcgctctgagcggcaggaggtttgtttcacgtttcactctttttccgggtgatttcactgccggtttggcctgtttcggactgatggcttttttcttcaggtggccgggaggtgtttgtctattgtgtttactttttttagccgccttgccgagagggctgcttgaaagccggatatcatcgatataccatccgtcttcattgagtacttcgtcagactgcatattaaacatgagctttatgttttggcctttatacgcagataaatccgcctcttcatcattccatcctgcggaatcaccattgtaaacggccgcctgctcccaatttgatttcccttccggcagaacgaacacatacccgtaatcaaaaaattcttcgagcttgtgccagcttttaaattgtaaaaacagccgccctgtttccggaacttgaatcggaggcatcacgagattcatgttggccgaatcggcataagggccggacagattcgtcgcatacactttatctccggaaaatgcggcgccgggccctgaacccgggataccccattcccattgatcatgtgtcccgtaactggaccagcccgccggctgtgattcaaaatcctctttgtatcccgccgtaatgctcggtttcacgtcagcccggtacgtatcagattctacagaatgacctccgaaatcttttatggtccatttataacttatcttgcttcccgttatgtccggaatctccgcctggtatgttccctttttttcatcaccgcttttttgaacggcggctgtcgttttccactctccttcatcaaactgataggagaggatcacctcagttatgcttacatcatcttctgctgtaaccgttaacggaaggtttgcccctttgtaagcctctgagaccggttcatgatgaaagctgggcggattgtgatcttcacccgcagaagataccttgccttctacgcttccgattccgtccgttacggcagaaacggcatcaaaagcgttaacgaggccgtggccgtaaccgttattcggtgattccggaaaaacggaatctgtcagcttttcggcggtgcgcgtcagaacgtcttccatttcatcgaccgtaatagaggcgttcgcctgccttaacaaagccgccgtcgccgccacatgcggcccggccattgaagttccgtcccagccgccttcgtatgttcctccaggaatagaagaacggatattcacgcccggagccgaaatgtccggttttgtttcatgatacggtgaggggccttgaagtgagaaatcagcgagtttcttgtcgatgtcagtcgcacctgtcgcaaatgcttcaggataattggccggatttgcgattgaacccggtcctcccggtgtaaataagtcttcatttcccgcagagaattccggaaaaatccctgccgctctccacgcattcaccatatcgcggtaccactcgtccattcccgaaccgcccgcccaggaattattgacaacatccggcgccatctcgggatgcggcgtgccgtttttatctttaggcgcaagcacccattcaccggcatccaaaatatcggcatcggttcctccgtcatctgaaaatgcttttactgcgatccatttcgcccccggagccacaccgatttgatttgagccgtcaggttctgaacccgtcatggtccctgttacatgagtgccgtgttcaagatcgtcgtagggagcgtctttatgggacacggcatcataccagttcatttcatgattcggcgctgctggattttcaggatcgtaaccccggtatttttccttaagcgcgggatgatcccactgaactcccgtatcaatggaggcgacaaccgtgccggttccgtcgtatcctgaggcccaggcctgcggcgcatcaatttggctgatattccattcgatgccttcctttgctttgacctctttttgttttttcttcatttgaaaaggagcttttgattgccgttgagtaagctgacgtttttcattcggaagaactttttctacttcaggaaatgaggcggctttttccattacctctttcgaagcagtaactgccattccgttgacaatataataggaatggatgtgatcagcctttcctttctttttttgtttttccaaatatgttttcagattctgctgcgcatcatgagctgccagttttaaagaagaaacaacggctgaccgcttttgatattcggtttttgctgcggaaagcgaatgagactcggcatttttttctgcttctttgaccgcttttttcgtattggctttctctttaaatttgataagaaacgtgactttatcatttttttcaaaacgcttcttgactgaatcggaaatcttatgctgaatgctcttagaggaagaaagatctttggtaaaagaaactgcccccggtgtgctgttcgctccgactgcccccggaaacaacagtgaactgacgacaatcgcgcttaaaacggagcctgtccatctgtttctcgtttttttcttcaatcgtatccccccttatttggtaacgccctataaaatgtgtatccctccttcataattggaatcgtttgtcatttcgatgctgtacgttaaatgtagacaatcttccatccagatattgtcacattctgtagaaagccgtatgaaacttaaaaacaatcaattcgtcataggtataaagcttcttttttcactgtatagatcatgggggataggaaggaagactgtgcacaaaaaagaaaaaggacaaaaccatgtggtcttgtccttttttacatcagccgcgtttgttgcggtttcttaaaaatgtaggaatgtcgagggcatcatccgccggttgtgatgtatggcggttcaccgtgttttgatgctgtgtttcttctcgtttcggctcacgtttcgcagcattttggctttgagacttcaatccttggtttaaagtcggacgctgcggttttgagtcatctttttcctgttcgataaaaccggtcgcaataacggtgacgacgatttcatcttttagattttcattgataactgaaccgaaaatcatattgacatcagggtcagatgcagaagcgacgatgtcggctgcttcctgcacttcgtagaggctcaggtttgtacctcccgtaatgttcatcaaaacaccttgcgctccgtcgattgccgcttccagtaacggactggagatcgcctttttggcggcttcagcagcacggctttctcctgtagcgatcccgatacccatcaatgctgaacctttgttggacatgatggttttgacatcggcaaagtccaagttgattaaaccaggcgttgcgatgaggtcagagataccttgcaccccttggcgaagcacgttatcagcttcacggaatgcttcaagcatcggtgtgtttttatcgacaatttcaagaatgcggtcattcggaataacgatcagtgtgtcaacggcttctttcattgccgtgataccgcctgcagcctgcagctggcgttttcttccttcaaatgtaaacggtcttgttacgacaccgacagtcaaagcgcctaagtcctttgcgatttgcgcgatcaccggtgcggctcccgttccggtaccgcctcccattccggctgtaacgaacaccatgtcagcgccttttaacgcttcttcgatttgttccttactttcttcagcggcttttttgccgacttcgggattcgctcccgctccgagaccgcgggtcagcttttccccgatctgcattttcacttccgcttttgacaggttaagagcttgcgcgtccgtgtttaccgcaatgtactctacaccctgcacttcattttcaatcattcggttgaccgcgttattaccgccgcctcctactccgattactttaattgatgctaagccgtctatgtttgtttcgaaatccaacatgctaaatcctcctaatctgccgaatgactatcaatctattcccaaaacatgcttaatagttttttcattttgctcggtttgttgtgttcggcttgtgttttttgttttgcttttggacgctgctgcgcctctggccgctgatgatgttcttcttcgtgagagaccgcgatttcctgcacggcttcttccggcatatgaaagcctatttttcttccctgaattctggcatttcggcaggcaaattgtatcaagccgacacccgtcatatactgagggtctcttacaccgatataattcgggcttgcgacccttacattgtgcctcagcacttcctgtgccaatgaaagcactccgggcattgcggcctgtccgccggtcagcacaaagccgccgggcagatctgtaattcccatatgctcaatttcggctgcggcaatctcaagaatctcttccactcttgcttcaataatattggcaatttcctgctgtgtaaaagattgcttttgattcgttcctatgacggtgacttcaaatacttcatcttctgaagcctcatcgtagaatgcatgtccgaattgtttttttactctttcagcctcttcggtggaagtgcgcaatccgatcgatacatctttcgtgatgttttcgcctccgagcggaatgacggctgtctccttcaggtgcccctgttcaaataccgccaccgtcgtcgagccgccgccgatatcaatcatggcgactccgaggtttttttcgtcttttgacaaagccgccgaaccggccgcaagcggctgcaggcagatatcagtaatttcaacgcccgctctctccacacagcgaagtaaattatgtaagatcgttttggagccggtaatcagcgtgccttctacttccaggcgcactccgagcatttttttcggatcggtaatttcgtctcttccgtcaacgataaactgtttcggaacgacgtcaacgatcagctgctcatgcggaaccgacacaacctgtgccgcttccattaccctgcggacgtcttcaacgtgaatttctttgttttcactggaaacagcgacaacgccgttcgtatcttgaatatgaatataatttccattaacgccgacaatggcttttttcagcggaaaacctaccattctttcagcttggtcaaacgcttttcttatagaatgaacggtttcatctatatcaacgattgagccttttttcaacccttcagacggtacatttcccactccgataatgttaagggaatcatctgtcatttctccgacgatcacttttgtattggacgtaccgatgtcaagactgacgtaaagttcattgttgttcattctatggcacctcctcacatttcgatcaaattctattctattatttgcggaacaacaatacaatgaatgtggctttacaagtgtgtaacaaaaacaacagcatcaacaaattcttatctgatttctcacaatttatgtttaatgaaactattcgttatattctatgtatatcctcttttatatcgcattttttttattttttttagagacggcccaccttaccgtaagatttcctgtcacggtgccataatgtgcaaaccagatgcaaatatacccgctttccattagtctacactaagatgaacctccagaaaagctatagatattgccagaaacatccgaaaaaagaagaaacaggaggaaaattccaaatgcaatgttcattgaagaagacacgcccattgcattgagaattttccccttgtccggcagccatatcccgggcaaaaacaaacatagtcataattattccgctatcggttatatcggctgccccgctgattgtaatagattcttttgaatcaccttaaaattagttctttagaactattaatcattttcttttttcttgccggatttacctttgttaaattcttcaaaatacgtagcgacttctaagtggataatcccctttttcccgccgtccagctgggaaacgatagaaggataggtcttcatccggtcggcaaatgttttaatagaagcggtaactacatacccgtcgttcatatacagcttgatccggtcctggtccatttttaccggtgtataatagatttcagaaatcgactgctttagcgaaccggaaagcttatcaagctgctccgccattttgacccgctttttcgcgtttgtccagtcaaccaaaatcgggcccgcgtcatccggcgtgacttcgttcggcagcacggtgccgttctccagcacttcataatacacatcattccgctgcagatacgcgatcgtcttgtattcttcaatgtgaatgctgactttattaggaaatacttttgaaagatccgcctttttcaccagtttattctgctcaatcttttcttctgtttttttcttgttcagactccagaactcggtttgtccgttatgtatatcagaaagcgcgttgatctcttttacagacacgttttcgttcccggaaacggtgacagaagacactttgctgatcggcatctgcaagtacacgatgatcagcaccatcataaaaaagagcacaatgaatgaaatcagccggcggtttgctttttgtttccgctgctctttgattttcggaatccgctcttcaatatttacgattttttctctttcatgatttgggttcactgcctgtccacctcactaagaatgaaacagcttgacattcgtctgattgaaaaacaaacggcatgctgtgatgccgtttgacatttgttaaaagtatatcacatgagctcatggaaatcagagaaccttttaacgattccctccgatgatttcaacttccgtatgcatgtcaacatcatactgctcacggattgtctttttcacatactcaatcaggtcgagaacgtccttggcagtcgctccgccggcattgacgataaaattcccgtgcatttcggatactttcgctccgccgatctgatgtccttttaatcccgctttttcaacgaggtttccggcatgattcggcagcggatttctgaatatgcttccggcgcatgggcttgaatacggctgcgtattttttctgtaatctttgttctgctgcatttgcgccgtaatggcttcccgttccttttgctcaagctgaagaactgcctcgagacagacgccggggcgttttttctgcaaaacagacgttctgtagctgaaatccatctcttcgtttgtcagccattcgattgtgccgtcttcaaataagatacgcgctttcacaagaatttcactcatatcagatccgtgcgccccggcattcatatagacggccccgccgattgatccggggatgcccgctgcaaattcgagaccggacattccttttttactcatggaagtcgcaagccggacgaccgaatagccgcctccgaccgtcacctgatcaccgtcaatctccaaatgatccagacccgcgcccagtttgatgacaactcctcttatgccttcatcaagcacgagcagatttgaaccccggccgataaccgtccatggcagatcatgtttcttcacaatatccataatatctttgaccgcttccacactgttggggatgatcaaaatgtccgccgggccgccgattttcatcgttgtatggttcgcgagcggttcttgttccagcactttgccgacttcgcggtctcttaattcctgaattacgttctccatcataaacctccgcattccatttgctctatttttttatgtcttccatgatactgtacagtctggctgccgcatccggaacaccgagtgattttgtccgctcactcatgtcttttaaggtttcttcattcatgacgattttgtccagcgcagcgatcagtttttctccgctgagctcggtttccttcagtacgattgcagcgtcatgctggctgagcgccttcgcattgacttcctggtgattggctgtcacatacgggctcggaataagcacgctcggaatgccgagagcggtgatctccgcaatcgtcgtcgctccggctcttgccacaatgacatcaattgattgtaagtactccggcatttggtgcaaaaacggttttgtcaccatattatcagcggcttttccgcctttcagctcagccgttaccttctcgtaatgcacttccccggtaatataaagcacttggtaaggtctcgttttcaattcttcctgcatatctatcacggcacggttaatgggagccgcgcctctgcttccgccgaaaatgagcaccgttttttgattgtctttcagcccgaactcagttaatgagcggcctgtcttaattgagacgacttcagaggctctcgggtttcccgtaaacacaactttttcagcaggaaaatgcgattttgcttcttcaaagcaaattgccaccttattaacatatttcgagagaaacttatttgtgatgccgggcaggctgttttgctcatgaatgatcgtcggaattcccatttttgccgccgcgtatacgaccggaccgcatacatagccgcctgtaccgataacggcatccggtttaaactcttttaaatatgatttgcttttcttcacgccttttaagaaacgcatgacggtttttacattttcaaaagaaagttttcgtttgaaacctgtaatttcaatggcgcggaacgggatattttcccgttcaacaatttttttctccagaccgttctctgttccgatatacaaaaattccacatccggatgccggcgctgaacttctttaataaaggccagggccggataaatatgtcctccggttccgcctccgcttactgcaatacgcattcgtatgtcccccttaatcacatagcgataaccctgttttttaggacagggttattgatgttgtctgtttttttatagataacgaatagatcatgagtgatgaggcaagatacagatcaatacctcgagtaccggctgacatttaaaagcacgccgaccgctgcgagcatcagcgtcagtgatgagcctccgtagcttaaaaacggcagcgtaattcctgttaccgggatcagccccgtcacaacgccgatattaatcatgacttgaatagctatcatagaaataataccgatggcgacaaagcttccgtataaatccggcgcgccgagggcaatcctgacgccccgccacaataaaatactgaacagcagcaatatgagcgaaccgccgataaagccgagttcctcagataaaatagcaaaaatgaaatcggtttgcggctccggcaggtaaaaaaacttttgccggctttggccgagccccatcccgaacagtccccccggacctacggcatagagcgactgaatgatctgaaatccgcttccaagcgggtcctcccacgggtttaagtaagaggtaatccgtttaatccgataaggagcggacagaacaagcgccgcaaatccgcttaaaccgatgagtccgaggaacgcaaaatgagcgattcgcgcaccggatacaaaaatcatcacgatgcacgtgcccaccattaccgtccccgttcccaggtccggctggcacataataataataaatgcagaaaacacgattccgagcgcgggaacgaatccgcgtctgaatgacgtaatattcttctgtttttcagaaagaaatttagccagaaacgcaatcatcgcgagtttcataaactccgaaggctgaatgctgaacgctcccactccgatccagcttcttgaaccgttccgcaccattccgactcccggaatcagcacaagcacaagcagaaaaaaacaaatgatcagaagcagcttcgaccatgtgcgccatgtccaataatccacattcataatgaaaaacatggcaatgacgccgatccccgcaaacagcagctgccgtttcgcgaagaaaaacgagtcgtcaaatttataatccgcccataccgcacttgcactgtagaccataattaatcctattgttaaaagcaataacgtaatgataactaataacaaatcaggcgctgtttttttagtagtcaaagcaatcgacaccccaagcataagtcatttagggctgccgatgaacagagacaagcccttacttaagcatatgcacggcatctataaacatgtcaccgcgttcttcaaatgttttgaactgatcccagcttgcacacgcgggtgacaagaggatgacgtctccttcatttgagagcgcaaacgccgcagatactgcttgttcaacattatcgacacgtttgacatgttgtattcccagctcattgcccagtttttctatcttcggcgctgtctgtccgaacgtcaggaccgctttgacattgtccatatacggtttcagatcgtcaaaaccgttgccgcggtccagtccgcctgcaagcagaataaccggtgctttgaacgcggagagcgctttgcttgtggccaaaatattcgtcgctttgctgtcattataaaatttacgattccggattgctgttacatactgcagacggtgtttgacaccggtaaagcttgtcagcaccttctgaatcgctttattagacgcgcccgccgtttttgccgcggctacagcggccaatatattttctaaattgtgcgcgcccggcagcacgatgtcatcaacaggcagaatcgcttcatcgccgaacatcagcattccgtctttaataaatgcgccgcttgacagttcctggtgcactgaaaacggaacggtgccggcttttccgctttcggcaagccgcacgactgtttcatcgctttgattcacgatggccgtatcactctcaagctgatgaagatacacgttctgcttggctttttcatagttttcacggctgtgatggtaatccaaatgagcgtcgaacacatttaaaatcaggccgatttcaggtctgaacgcatgagtccccataagctggaacgaagaaagctctgtgacgatccattcatcaccgtcagcatgataagccacttcactggcgacagtgccgatatttcctgcgatcagcgcctttatcgagtcagctttcagcatttcataaatcagggtcgtcgttgttgttttcccgtttgaacctgtaatgccgatgaattttgcattggtgatataatacgcaagctcgatttccgtccaaaccgggatgcctcttctttgcgcttcctccaccatgatattttcatacgggattccgggatttttgatcagaatggtaatgtgatgctgatcaaaaagtgacgtcggatgctcaccgcagatgacctcgattcctctttctgaaagcctttgggcaggttcgttctcttcaaaggctttttgatcattcacgacgacgttaatgcctttttcatgaagaatcgacgcagccgcatatccgcttttcgccagtccgaggaccagaaagttttgttttcgcaaaaaaagttcgttttccacttataaccacacctcgatgtaaattcctaaaacggcaagcagcagtcccgcagtccagaatgtgacgacaactctccattcagaccatccgaccaattcgtaatggtggtgaagcggactcatcttaaagattcgttttcctgtcgttttaaagctgatgacttgtaagataacagataaggtctcaataacaaaaactccgccgataatgacgagcagaatttcaagcttcgtcagaatggcaacggtcacgatcgctcctccgagcgcaagcgaaccggtatcccccataaatactttggcgggatgggcgttgaatacaagaaaaccgagaacggcgccgacaacggcaaccgagaaaatcgcaacgtcatattgtgactggttccacgcaaggatggcgaaagcgccgaatgcgatagccgcggtaccggacaagagaccgtccagaccgtctgtcaggttgacggcatttgaacctccgacaagcataaagagaacgaggataaagtatccccagccgagatcgattgacagatgtgtgcccggcaccctgatgccggttgaaaaatggcaataatgatatactccgtaaaatacaatggcaataatgatctggccgatcaatttctgcttcgacgtcaatccgagattccgtttcattactactttaatatagtcatccagaaagccgagcaggccgtatccgatcgtaacaaacagcagaagaaacatttccgcgctcagatgcgaaaatttctgcgtcatgacaatcgccgtaatagcgatggatacgataatcatgaccccgcccatcgtcggcgtccctgattttttcatatgtgatttcggcccctcttccctgatactttggccgaattttaaacgtcttaaaaacgggataagaatcggagatatcagaacactgattaaaaatcccattattattgtaaataaaatcacttgctcaagcattgctcttttctcctcccgtttcgttcaaacgacatacgtatttatcatattcacattgtgtccccgtaattcttttcatttcactcattctaacactctttcctgttttactttttattcagctcaacaatagctcttcccgctacttcggcgtcatcaaagtcgaatgtttcattgccgatctgctgataggtttcatgccctttcccggcaatcagaaccacatctccctttttcgcgttggcaatagcaaaaaagatagcctgctcgcggtttgcgatactgtgatagtaggtgccttctacccctctttccatatctcttaatatggccagcgggtcctcgcttctcgggttatctgaagtgaaaatcggttcgtcggcaatccgcaccgcaatttccgccattttcgggcgtttcgttttatcccggtctccgccgcagccgacgacgacgaaaagcttgccctctgtcatgtctttgcatgtattcagaacgttttccagactgtcaggcgtgtgcgcgtaatcgacgaccacaggaaacggctgattatgattcaccagttcaaaccggcctctgacaccttgcagctcttcaagagcgctcgtgatcgtatcaaacggcagacccgctgcgatcgctgtcgccgctgcagccagtacgttatacacgttgaagcggccgacgagtgaaaccgtgatctgctttgttccttttggcgtaacgagttcaaaatttgtgccttgcgcagagatctcgatttgtttcgccatgacatcggcatcgttctcgattccgtatgtaaggatgtgcgccgccgtcactttttcaaaataagcactggctttgtcatctgcgtttaaaacggcccgcttcggcttttcatggttaaaggagccgcccagctgggaaaacaggaggcttttagcctgtctgtagtcttccatcgtcttgtgatagtctaaatggtcctgcgtcaggttcgtgaatacggcgatatcataatcgcagccgtgaaccctgccgagtgacagagcgtgagaagacacttccataatagctgtgtcaacatgctcatcattcattttcttgaacgttttttgcagtgtgacgctttcgggcgttgtatttttgaccgggaatgtctcatccccgattttaatgtacatcgttccgattaaaccggtctgtcttcccgcttttttgaaaatctcatcaaccatgtgcgtcgttgatgttttgccgtttgtgccggtgatgccgataagctgaagctgctttgtcggctgcccgtaaaacgcgtcagaaagaacgctgagcgcccgctgtgaccggcggacgataatgacaggaacatcgacgtcaagctctttctcggcaacgatggccgctgcgccgttttctgcggctttttgggcgaaatcatgtccgtctaccgtatacccttttatacacacaaaaagactcccttttctcacttccctggagtccatctcaattgaagttatgtcagggtcatgaaagtcattttgaacaggttcggccattaaatatgtaagcagctttgtaagtttcattgtatcaaacctctcagaaattctattcattcttttatcatgataaccgtttataaaagtcagaatggcttttaaacatacagttcatattttagcgtaaataaaaggatacatccagttaatcttaaaagttatcttctttttttctctttatgataaaaggcagccgaaaacaatcggctgcctcaaaaagactcattcttcactcaagtaaacacggatctttgagccttcttttactttcgttccggctgcaggtgattgtttcacaattttgcttccttttcctgaggagtcaatattcaaattgacaagcagcgactcaagatcagagacagacatccctacaacattcggaacctctattgtttttgtgtcgttccattgatattttttctcgatttgattttttcgcggtttcacgccgagctccggcagactgtctctcatcatatttccgacaatcggcgcggcgacggttcccccgaattgaatcgtgcctttcggattatcaaccgcgacatacacgacgaggctcgggtcatcagccggcgcaaaaccgataaaggagacgatatggttgttttcgagatatttgccgtctttgaccttttgtgcggtacctgtttttccgccgacgcgatatccttccacgaaggcattccgccccgttccctgagcgacgacgctttctaaagcatatctgatctgctttgacgtttcctgggaaataacttgccttttcgcaatcggcgattgtttcttaactgtttttttcgtaacgggatcaacccactctttggcgataaacggagtataaagcgttccgccgtttattgctgcggaaacggctgccacctgctgaatcggcgtgacggaaaccccttgtccgaaagcggttgtcgcctgttcgaccgggccgactctgtcaagcgggaataaaatccccgttccttccccttgcagatcaatgcctgttttctttccaaagccgaagtccttaatatattgaaacagcttttgttttccgagccgttcccccagctgtacaaacccggggttgcaggaattttgaacgacttcaagataagattgcgaaccgtgaccgccctttttccagcatcggaggcgggcgccgtcaacctcggcaaatcctttgtcataaaagtggtctctttgcaagtttactttttgctcttggagagccgccgcaagcgtaataatcttaaaggtcgaacccggttcatatgtgctccataccggcaggttccggttgtaaacggacggatctacggattgatagtcagccggatcaaaatcaggacggcttgacataccgagcacttccccgtttttcggattcattgcgaccgcaatcattccgtccggattatatttcgccgctgcattatcgagctctctttctataatcgtctgaaccttggcgtcaatcgtcaatttcatatcaagtccgtctttcggaggggtgtaatcatccgcttcatcaggcattttcttccccttggcatccgtataaaatttcactgatccctttacaccttttaagtcatcatcataataagcctccaatccgagaaggccctggttatcaatacccgcaaaaccgagaacatgggacaaaaagcttccgtacggataatggcggatgctgtcttcagccacataaaccccttttaagtcgagcgctttgatttctttcgcttttttattggaaattttccgcccctcgggtgagattttttctatggaggttttcttagtaatgtgtttgtagaccttctcttccgacatatttaaaactgacgcgagaagcttgcccgtttttatgggattttgaatctggcgcggtacgacaaagacggtcggcgcgcttttattcgtagccagcttcacgccgtttcggtcaaggatttctccccgctcaggctcaaacggcaaattccggctccaggaatccttagccagtgaagtcagcttttctcccatcacaaattggacatagcctaatctgctgtcaatgatcaaaaaaatgattacgccaaaaagcaaaaccagtaataaacgttttcgaaccgttacatttgaaacgcgcaagggaccgtccactccttatttaggcttgtttcaatttatgcctcagcttggacacatagaacggcggcgcataaaaaagaagcccgcgggcatccgcggacttctctgtcccgttaatcaggatttttaaatttcaccttgatcacggtattttctttcagttctttgccttttttcacactttggcttgaagcgtaaccttcaccgctcacatcgatgtgaatgcctgatactttgctgaattgaagcacttcccgtctcgaccatccggacatatccggcatcgtcatctttccgtctgtttttaagaagattttctgattggtgatcacatcttctccggctgtcggatactgctcttttacggcaacatcgctgccgatgacaatcggtgtgagatgttcatttttcgcttccttctcagcgcccgtgactgtcttatctgtcaggtcaggcatcttttggcttttcgtttcttcctgaccggaatctgttttttccgtcggttcgatattcatgtagtggaggctgtttttcatcgtcgggttaaagatttccgcgacaggatcagagctgctttgacccgcttttaactgcggctgctgcacggctacatagatgacgagcttaggatcatttttcggcgccatgcccatgaatgaaaacacatagttgctcgttccccttaaatatccgcctgtcccggcgatttgtgcggttcccgttttacccgcgacgtcaaaaccttcaattttataaggttttcccgttccgatgtctgacgtcacgacttctccgagcaggttccggacttttttcgccgtatcggctgaaatcggcgtgccaacttgctccggttttgtctgcttgacgacttttttcgtatcggggtcgacaatatgatcaatgacgtaaggtttcatcattttgccgttattggcaatcgccgtgacggcctgaagctgctggatcggtgttatcgccgatgcttggccgtaagccgtagacgctttgtcaaaatcatatttgtagttaattttacttgatacttcaccgggcagatcaatccctgttttttgatagagcccgaatttgtgcaggtactcattaaaccggtcaaaccccagtttttcgttggccagtttggcgaaagcaacattcgatgacctcatgaggccgtcatggaagcttgtcataccccatccggcgccatcgttccaatctttaacaggtttgcctcccactttatatgttcctgatttatatttctcgtttgcggaaaacacattttcctgaatcgccgcggcaagcgtaaagatcttcatcgttgaacccggttcatacgcgtacgacactaagtcgttgtaataattggtgacgtttctgatattcgggtcaaaactcggacgctgccccatcgcaagcactttgcctgttttcggttctacgacagccgccataatttttttcggtttatatttttccgctactttcgtcatgctgtcttctagaaaggtttgaattttctgatcaatggttaaatatacattgtcaccgtttttaggtgcggtgattttttctttgctgttcggaagtttccagccggatttatcactttcgtaagtgacggacccgtcacgttccgtcagatagttattcagtattttttcaagtcctaaagagccttgtatctcgtttgttttttcattcacatcggcatagccgagaacatttgacaaaaatatgccgttcggatagtagcgcttcgtatctcttaagaaagaaatacccggaagatccattttttcgatcttttgttttttcgcataagagatatcgcggccggctgaaccgaattccacctgcttcgcgccattcctgtttaagatgtccagaatctcgcttttatcaagattgataacggtcgccagtttttccgccgttttctctttgtctttgacatgctgaggatgcttcggatcactcgtcatttttttatcaagcacggcaatgagcttatatgtcgccgtgtcctctgcaagcactttgccgttccggtcaagaatagagccgcggctcgcttctatcgtccgctttttttcgtgctgctcggtcgcttttgttgcaagttctactccgtttgctttaccggttaattgaatgtacgccattctcccgagaatgacaaagaaaaagagagcgaaacaaatactgagtatcgctgctcctctgttcataaacttattttttttcggcatgggttatcattcctgtatgtttttcacttttttatctttcagattcaaaccgtgctttttagcgatatccatcaggcgctgcggctggcttaagtcagcagccgtcttttcgagatcaccgatctgcttattcttctcagatactttctcctccagtttttgcacctcaatattggattggtacgccgcgtatgcctttgatacgataaacattgatgtggagagaacggcaatggcaaacaggacgagcagcaccttttccccgagtgtaatggaagccctctttttgacaatcacctttttttcgggacttatcactggccgttgttgtttttcctgctggtaagctaagttgctcataggctgatgacctcctttaatgttgtcatttgctgcccgttattttcgtttctccgcaatgcggagcttcgctgaccgggcgcggttattttcttcaagctcctcttttgatgccgtaatgggctttctcgtaatcagttttaattccggttcaaattcttccggtatcacgggaagacccggaggcagttcgggaagtgatgatttttccttgaatgtcgtcttgcacattctgtcttccagcgagtgaaaagtgatcacagacacccttccgcccggcttcagcacctctatcgcttgcaagagggcctcttcaaatacctgaagctcgtcgtttacggcaattcgaatggcttggaatacacgtttggccggatgacctccgcttcttctcgccggagccggtatcgcgtcctttattagatcgaccagttggccggttgtttgaataggcgatttttctcttgcctcttcaattttccgggcgatctgcttgctgaatttttcttctccgtatttaaagaaaatcctcacaaggtcctcataccgccattcatttacgacttctttcgccgtaagggcggccgactggtccatcctcatgtccagcggtgcgtcatgatgataactgaatccccgttccggtgtatcaagctgcggagaggatactcctaaatcaaataaaattccgtcgacactcgtaatgccgtgttcatgtaaacactcttttaaataacgaaagttgctttttaccagaatgagctgtcctttgtattcggacaatgttttctgtgcgttttcaagcgccgtgtcatcttggtcaaaggcgatcaggcgtcctttttccgataattgctgcaataaatatgtactgtgcccggcgccgccaagggtgcagtccacataggttccgtccggtttgatatttaaaccgtcgacggtttcacgaagaagtactgtcttatgctgaaacatttgtgtcggtcccacctttatcaggaatgaattgaattgtcagttgttgttgtgatgcacgaagatccattatatatcaaatccaatcatgttttcagcaatttcagcgaatgaatcttcttgctcttctgtgtattgttcccatattaccttactccacaattcaattcgattggaaaccccgatgacaacacattctttttccagttttgcgtaattcagaagagatgacgcaatattaacccttccctgcttgtccagttcgcattcggtcgcaccggaaaaaaagaatcgggtaaatgcgcgggcgtcttttttggtgagcggcagagccttcagcttttcttcaatcagcttccattcattcatcggatagccgaaaaggcattggtcaagtcctcttgtcagcacaaactgctcaccgaggccttctctgaattttgcgggtacgatcatgcggccctttgcatcaattgtatgctggtattcacccataaacatgataaggacccccactttctcccctaaactcaccactatccgccacttctctccacaacctcattttacactgtttacacataaaaaaaaaccctgaactattcagggttctttaaaactttatttcaaagtttgacaatctgatgttggttttgaaaagaaaatggcagatgtttgaaggttgtgaagaattttggaccataacggttcaaataatacattacattccaaatccgttcctgcggagcgccgagcggtctgatgctgttttggattctttcatagtcacgcagcacaaaaccttctttttcttcaattcttttcgttaccgtccgttctaaaaacaagagctgatcctgaatgaaggcggcattcttctgtaagagcggctcaaggcttgaatcgaccttcagcgcttcgttccttgcgcttttatggacagcttcaatctgcgacttcgcctgttccattacagaagaaaactcttccggaatctgctcttcaaaataagcgtctttcaggtgtccggtgccgtgttcgatcgcttcctgaagcggaatattccgttctgaaagcttcttttcaatatggcgctcaagaatcgtaatgttcagtctcggcactaccggcgtcatgcggaagcccattaatgagaaagcctgcttcagctcaccccaataattgatctcccccggtcccgcgataaacgccagagtcgggatgagaaactcctgcataagcggccttgtcacaacgttattgctgaaacattccggtttttcttccatatgggtatgaagctcgtcgttcgtccacttcaggtcaagctccttaatgacaaaaacgccgttttctttttcaattaagaaacgctctccctcgtgttcgtaaaacagattagcctgatctttgtccgattcaataatcgggtgataaccggcttcccgcataagacgctgctggtctgacacggctttgacaagctcgtgattgtgttttaaaatctgctgaaacatacccgtttccagctttttaatccccggatctcccgaattcatcagaataaggccttcttcttgaaacaagtcggcgatcaacagctcaaaaaagtccgtgaatgtctctgatgagcgtaaacatcgcttcacgttttgaaggagtgtgtttgtgtgatccgtttcctcaaaagcagcgaacacttcatcaatccaagccgcgcatttttcctgatcaagctcggttttagccgccgatgtttttttccagtacgactgcggcagtttccgcttcaccggacctttattctctgttgacgtatgcacataattaatttcttccagatcgtgatcttcacccgccacccagaaaatcggagcgacaggaatctgcagcgcctcttcctgctgtctggcaagtacgataatggagataattttatgtatggtgtaaagaggccccgttaaaagaccggcctgctggccgcctacaaccgctgcgctttttggatctctcagtttttcgatggaggcctgcatggcggcggagtgaaatttttcgtgataggaggataaataatccgctaattcctctctggcaaacggccgcgaagagaggtcatgaagccgcttttgccatacgtcctctgaatgaatatcataatcaaaaaatgaagacatgttttctccatctatatagtgctgcacaaacttattttgacttttgatggaaagttcagttagctgcatctgtctggaacttcctttctccaataaatagttaggtttccgaaatgagtatagcatgttaccggaaaacctcaaaagactttgtttcaatttctttctaacgcttttatgctgcggtgtaaaaacgtgagatgaacggccggcaatccgcggctttccgcttcttttacaaggtagccgataatcgcatcggcctcggtccgcctgcctgccatgatatcgacgagcatggaagaatgatttttttccgtcagtctgcaaacttcgcaaaccttgttccacgctttttctctatcggcgaggccaagtattgtctccgcttcttcaaacacgtttctcatatattttttgtaagcgtcatttcttaacagctctccgtttttcacgcgcagcaatgcagttaacgggttgatgcatacattgatgatcagttttcccgttaaaagccgataccagtcgttttcatcatatacgggaaaatcccggtgcatgccggaaaagatgcttttgagcgtttccggccgggatgcgctgaatacactccatcttacggctcccgctcccgtatgttcaacggcatgatccgatatcttttttgctccgtgctcaactgtgccggcataaagcgaatgatccgtatgccaatctctaatgtcgtgtatgtgtcccatgccgttttgcaaaaacagcacattcgtcccttttaccgtctcaagatcccgcagcacagcactgagctggtgctgtttaacggctgcgattaagaggtcgaatccggaagtgatgcctgtttgcgctctgcatgccgccgtacattctattccgtctttcaaaagccgtataccgcctgagttaatcgcatcagcctgctccgtccgccgcgtaatgactgttacctgatggcgggacgataagtagtaagcacataaaaggcctaccgctccgccgccgataattccgattttcacactgtcacaccctatatctgcatttttccatattatcatagcagaagccgccgcaaattacttcaatttcgttttgagcaaaaagacaggcaagcatattatagttggaattttcaattaaagcgtttacaataatggtagaacacaacaaagggggagtttgtgttgaaaatagagcgcctgctcatcaactttaagacactcgaagaatttaaaaggtttaaggaatacgggatgcaggagctgtcgatgcttgaagatcttcaggataatatcattgaaaatgacagcacctcgcctttttacgggatttacttcggggataaactagtggcgagaatgagtttatatcaggtaaacggaggcgcgaatccgtattttgatcagcgtcaggactttttggaactttggaagcttgaggttcttccgggctatcaaaacaacggatacggaaaagcgcttgttgattttgcaaaatccttcagaatgccgatcaggacaaattcacgcatgaaatcagcagaattctgggataagatgaattttgagcccgttaaatatgatatggcgcgtgataaaggagaaaatccttacatctggcatcccgatatggacggtgaaatgacatccggagaaacggcataataaaaaaccggccgggccgccgccctcaggccggttcattttacaggctctgcgccgatttcctgtcgtcttcttttgaattgaccatccttctcgctctgtccataatgtcaattaacgctttataatcttcttccgtcatctccagcttgtttctcaagctttcattttcctcacgcagatcctcgacttctttttgcagcgcggtcagctgttctgtgagtttttctttttcatgacgcacatccgctgcggccggcgactctttaaattgctgaagaaacaaaatgacatcatcaatggacagctctttttctccttccgccctgcggatcggaggctgtttgacggttcccggcagattggcggaatgcaccccgatctgctttcttaattccttccgctgttttttcgccagttctatccctgactgatattgttttctgacataagaattccatctgaacccgcaggcggcagccgttctcgtcagcgctctgccgacttcttcaaaagcggaaagctgggtcccgccttcccgaatatgcctgagcaccacttcggccagcagcaaatcttcatcttgcgtccacgcgtcttgtctcgttatcgtcaatcgtatctccctccatatttgctcatttacctcatacatatgccgctgatagattagatagactactggcgctcacaattttttcggcggaagcaggccggaggggcaaaaaaaaagaaaagcgcaggaaccgagattcccgcgcttttcttcatacattaattgcttttaacatttatgtctttgccgttgtatgatccgcatgctttacatacacggtgagacaatttcatctctccgcatgacgggcattctgtcataccaggtacatttagtttgaaatgtgtacggcgcaatctttttttcattttagaagttcttctaaaaggtacagccattattcccacctccttaaagagttaagattcatcatcttgtgttaagagctttttcagatccgcaagtctggggtcgatttgatttttcttgtcttcctcagaaatcacttgccaatccttccccacttggggagcggctccttctttttgttcagtttcacaaaagacttgcataggaatttctaaaagaatctcttcttttacgatcggagttaagtcgacgatatcgtcttcagcaatatgaacgtcctcatcttctatatcatccgacttatgaaatctaaacagttcttttgtcgcgattgtaaatggatacggcacatcaactaaagttcttgagcacggcaaaaccatttcgcctgaaatcgtaaagtcaaacgaaacttgcttggattcaatctccgcgcggcccttcacccggacgggagaaatgcggcggatgtcagaattcaattttgtcagctcatttaactcaactgtttcatcaaattcaaagctctttttcgccatttgatgaagctgataaatcgtccatttcatttgtatcacctcaggaaagcaacaaacatgattatagcttttcagaatgtttttgtcaatattttttctttacagcataatgccgccgtcatgcaatcgttgacagccggataggctatgcatacactaaacgaaacggactaaaatatgcacttcatttgcaaatgtaccacacgaagcaaaacatagcaagaaaggcgggacaaatatgaaagcagtcggcctggttgttgaatataatccctttcataacggacaccgctatcatgcggaacaagcaaaaatcaaaacggacagcagcgtcgcggcggcggtgatgagcggcccttttttgcagcgcggagaaccggccgccgtctcaaagtgggcccggacaaaaatggcgctggaaaacggcgtggatatcgtcattgagctcccttatatgtatgccgtacaaaaagcggaattattcgcgcgcggcagcgtttcgcttcttcatcatttaggatgcagcagcttgtttttcggcagcgaaaacgggcggatcgaaccctttattgaagcgtctgaagcgttcagccgaaaggaagatgactgcagcctgattctgaaagaggagctgaaaaagggtctcagctatccggccgccgcctcaaaagctttttcacacatattcaaagggcgggacatgctcgatttgtccaagccgaacaatattctcggttttcactacgttagagcgatacacgccttcggttccgctatgaagccttatacgacagccagaatcgcttcccagtatcatgacgccgagcttcccggagataacagccggatagccagcgcaacaagcatccggaaagcgctgatagaaaaaggaacggcggccgcaaggagctttctcccggaagcgtctgcgcgtgagctggaggcatacagaaattcatacgggatatggcacagcaccgaagactatttttcatatgtaaaatacagcctcagcactctgtccgctgaagaattgagccgaatctatgaagtggaagaaggccttgagcacagaattctgcgcaccatcagacaagcccgatcctatcgcgaaatgatggaacgattgaaaacaaaacgatacacgtggacgaggctgcagcggatgaacacgcacattctgacacggacgaaaaaggaggacatgcatcggctcttacagccttcaagcgctccttatatccgtcttctcggaatgacgaaaaaaggacaggcgtacctgtcggcaaagaaaaaagagcttaccgcacctctcgtcagcaagctctcttctttctctcatcccgctctggatctggacatactggcgggacgggtttacagcctgccgataaaagaacctgaacgcacattttttgagaaacaggaattttcacaagcgccgatccgctatgatgaagacgaacagcgttttttgaatgcgtaaaaaaagcacctgcctgtatcaggtgctttttactttcagatgatccaaatagtcaagtgcgtcctgcatggtgtcgacagggacgatcttcatatcggacttgattgctttcgccgtttttaccgcatttttgtaatcagaattttcagctccgttttgattcggcgcaaagaaaatatcttttcccgctttgtctgcggcgacgactttctgatcgattccgccgatcggtccgaccttgccgtccacgtcgattgtccccgttccggctatattatagccttttgtttcgtcaggttttgtcagctggttgtaaatttctaaagacatcatgagacccgcagaaggcccgccgatattttcaatgctgaaatggagatccggctttactttcacgttccgatccgtatataacgcgacgccgattcccgctcttttcgggtcgtccgggaatgatttcagcgcaatgtcaacggtcttttctttcgtgtcccgttcaatgtgaaacgttactttctcccccgcttttttgctgctgatataatcaatcagcttttcagcggattcgtatgttttcccgtccgcgctgatgattttatcaccgacctctatttttccttttgccggcatgtcagagacgactgagctggcgaaaatcccgttaaatgagtatttcacctgtttcccggctttttgataagcggcaatgaccgcgttttcttgggagcttttcatcatttgcagctggcgcttcatataatccgagtccgattcgccctcttcttttatgctttcatcagggacgatttcatcgtaaggatgcactttcgcccaaagatatgtatacggattggcggggcctactttgacagtcatcaaggaaaggcttcctttttcaggatagcctccgtccaccttaatcagcggtctcagctctgatgcttctcccggctgtgtaatgtaatacggaagcttaataaatgtaacagcaattaataagatcaggatgataaacacccagcgaaaatgttttgctttcatatgagttagccctcccagttctctatttcttgtttaatccggccgatcatccggtctgcggcttcttcgcccgctgtgatcatatgatcaatgttggcaaaagaacttgagctgaatgattcaagagaagggcggatcatgacgtctgcggcaatggtctggtgacggaccaattcattttgcagtatatccatactttgcatgattacatcaaaaatatgtgccgctttttccgtttttttcacccgggatacgtcagaggcgatgacgatatcagcacccatgtcttttacggcggacaccggtattctgtcgaccaccgcgccgtcgactaacatacgtccgttcattttttgcgggacgaaaacgcccggtatgctgatgctcgcgcggacggcttcggatactgaacctttcgtaaaaacgagtttttcgccggtctgaaggtcgcaggccacgatgccgagcgggatccgcagttcttctatcggcttgccgtacgtataggcatgaacgagctgcctgatgcggtctccttttaaaaatccgagcctcggcatcgtataatccgcatacagccgccgcttaaatgctttggcgacttttttcatcgtagccacgtcatgcccggccgcataaaagctcccgactaatgctcccatgctgctgccggcaatcatatcaattggaatctgatgcttatgtaaactggataacactccgagatgagcgatgcctcttgcccctcccgaacctaacgctaacccgattgtaggtttggccaacgcgacgaaccccctaatagacatcctatacatgaattctatggtctaaattgaacccctatgctcgtatattagtacaggatgacaaataggtacttgcccggccgcctttaaggtctgttctatattttatcatgatataaatgtcagtgtgcaattttagcatcggggaggtaagaatgaatttgtctaagtttcatacatttttgatttcattgtttttcatttttttgacggcgacggttatttcacaccctcaggcctcattcgaagcctccaaaaccggtctttccatgtggtgggaggtcgtttttccttcattgcttccgttttttattctatctgagcttttaatcggattcggcattgtcaaatttgtcggccttttactcgaaccctttatgcgtcccattttcagagtgccgggggtcggcggatttgtactggctatgggcatggcttcaggcaatccggccggcgcgaagctgactgcacggctgcgccaggataaacaaatctccagagtagaggctgaacgcctcgtctcttttaccaattcatccaatccgttatttatattcgctgccgtggcggtcggcttttttcataacgcgtctctcggcattctgctggcatcggctcactatcttggaaacatcgccgtcggcctgacgatgcgttcatacggacggaaagaagaagcggcgtataccggtaaaaagacgatcgctctcccttctctgaaggaagcatttctggccctccacaaggcgcggctttcggaaaagcggccgctcggaaaaattttgggcgacgccgtcacctcttctgtacaaaccttgctgatggtgggcggttttattatattgttttcggttttcagccggttattatcaatcgtacaagtcatggatgtgctttctgtatttacaaacgcgctgctttccctttttcatcttccggcaaatctggacatccctcttatcagcggaatgtttgaaattacacttgggagcaagctggtcagtgaagctgatgccgccttgctgccgaaagccatgattgtgagttttattctcgggttcagcggcctttccgtacaggcccaggtagccggcattttatcggaaacagatatccgctttaaaccgtttttcgcggcgcgtatccttcagggcatttatgccgcactctttattctcttactgtggaagccgctttaccttgcattggacgaaccttaccagtccgtattcctccctttccgcgatcaggacgcgggatctgctgccgtcagcggatggaatacacttgttgaaaccgggcccgccatcacgctgacagctctcgccgtatacgcattgatttattgttacaggctgtcagcacggacaaaaaaaggatgagacgccgatcagcgcttctcatcctttaaatttctgcttcagcgcctgttcaacttccggaggaacaaactctgaaacaggcccgttatattttgcgacttcttttacgatgcttgaacttaaaaaagagtactgattgttcgtcatcataaaaaaagtttctattgattcgtcaagcacgcggttgacggaagtcccctgcatctcatattcgaagtcagaaacagctctgagccccctgataatcgccttcgcccgcttttttttcgcatagtcgattaacagtccctgtgacgtctcgaccgtaatattcggaatgtcttttgtcacttctcttaacagctcacagcgttcctcgactgtaaacagcggctgcttagaagaattattgagcacgcatacgtacacctgctcaaacacgtttgccccccgtctgataatgtccaggtgtccgtaggtgacgggatcaaaacttccgggacatacagctatacttgccacatcattaccccctatttcggtatatcgtcactcctgtaagcccgtaaatttcccttcttgttacagaaagcgcgccgacggcttcaggaagcacaacggctttatcatgctcggctacgacaaaaccgtcttcattcagcatgttctgctcatcaatcatttcgataagcgctttcagcttttgttccttatacggaggatctaagaaaattccgtcaaaacctttttcccgtttcgccgcggcatagagggcccgctctgcatcattgcggtatacttccgatgaagacagcagatcgagcgctttgatattcgcttttaccgtttggatggctttgaaatcacgatccacaaagatacagcggtcaaatccgcgcgacagcgcttcaatcccgaggccgccgctccccgcaaacaaatccagccctgttcctccgtcaaaatacgggccgatcatattaaaaatagactcttttactttatccgtcgtcggccttgttgatgtgcccggcaccgcctttaaggctcgtccttttcttgaaccggaaattactctcattattcacaccactttttctgaaaactttgatgtttctcatcggctgagccgttatgtataaaaacaatccctatcttatcataaagcattctttcaaacaatgaacgtgaaaaacgtgtatacatattcacattcctgtcaagactacgtgtaacagcatcaatgaatgatgttgttgccaaccgcggagaagacttacgtttccccataagttcttcctccggtttctcctctcccttttccttctccttaacttgttaaggaatagaaggaccccgcaggtatctgcggggatttttttatataccgactttataatcgtactctttcgctttatcaagctttgattcaaattccagctttaaaaaaggtttataagaaggctctaccttcttcacataagaataagaagaaatcttttccattgttttttcgatcaggtccatatcgcaatacagcacaacgtatttcagccgcttggaaacataatgaacgttgccgaattttctcagcattttgctgtgttttaaagaatgcagatatacgattatgccttggcgcttattttccatcatgatcacccgcctgactttctgttcattttatgtaaaagacgagacggccgtctcgtcaggaaactttgcatccgcagccgccgccggaaccgcagccgccgccgcaggatgacaggccgtcaaaataaggattccccgtcggcacttttacatgctccgagacggccgttccgagttcaatgctgatctcgtcaagcagcgactgaagctcagtctccgcttttttaaattcggccaccttatcgtttaaatcgagctcccgcttcatttctctcattttgcgggaaatctctctataatcaggatggtatttgccaaagcgctgcacatcctcatactgctctttaacgctcataaaagaacgaatgatccgccctgcctcttcatcttcacggagacgcttgtaacaatcgcggtaattttcagccgtctcagactgcagaatcatgccggcaagctgttccgcttcactttgaagcttgacggactcaattgttgcatacataaatacgcacctccagttgctagtttaccatgaaaccacccaattggaaaatgcggcgtttaaacgctttttaatcctgcgaacgcatggcgtgtaccatctgcatcatcatctgcgccatttgaatcccgtttgagaattgacttacccgatgcggtatcgtcttttcataaaaattcatcatgtcaagctgaaaggaattgagatcgtccggttttctcgcaagtctgcggtaccagacgggacgctgccgtataaaccgtttccgttcctcatctgcggatatgaattcctgaacctcttttcgcatacacgatccccttctttaatcctttctgaatgaaaaaggatgttgtccggagccttgccggggctgcttcgtgctgctccccgaaaattggcttaaaaggctttgcaatgatgaaatggactggctcattttattgatctgctcattcatttggttgatatccatctttttgacggcagtgaccatttttgaaacgaaatcgttcttttcagctggttcctgtttggtttccgcgtcggaagaaggctgaacggcctcgtctttaaaagggtcccacatcgaatcatcctcgcccaggagaacccagttttcatagacttcctgccagcttctttgttccttgcgaacattttggatcagtttgggatgcttttttacgaattgtttaaaatcatcgattgattgccgtgattgctgattcgccacaattctcaccccctccgaaaagttttgcctgctataatgtatcggttcatgcgccttaatgttcgcctaaattgcgaaaaaaagcaggtatatttttttcagcaggagcgccgctcgcgaaaaatcataaaaaaaccgcgggggacgcgcccctctgcggttttttactgccaaggcttaatgaagttttgcgtataatacttccggtccacgccgacaccgaggtgcgtataatccgggcttaacagcgccttcctgtggccttcgctgttcagccagccctccacggctgcaggaccgtccacatagttgtaggcaatattttcaccggcctcccggtatttcacatcgcctttttccaagcggtccttcagagtcccgtatttctttgagacgtgagagaaatacttgttatccttcatgtccttgctgtggccgaatgccactttcgcggcgccttcgtcccatttcagccttgccagtccgtgtttcacgcggatgacatttgtaatgtcgagaatctgctgttcactcgctcgttcaatgtcgttccattttttatcagaaactggctcgggttctgtcagctttcctctgtacatgacctcatacggcctttgtttcaccagcgtttccgcatcaaaagccctgatgcttgacagattcccgtcaaatttgtccatgtacagctgaacatacattccgcctatcttgacggtgggacgggtattgatatcttcttcggaaaactcaaaccgatacgtgtttcccttgtcagtcacattgacaaaaggagaaacctgcgtcgttttaaaaacttcgcccgtcgattcgccgatcttaaacggttttgcgttgatgccgcttcccgaagcgtataaagtcacggctttatcattcaaaataccgacttgtacgtattggtctttcccctggttgtacacccaccactcgtaatcgtaggcagaaggatctttccgggacggttccccaagtttctttttcacatcggcggcagatttccccatgagagaaagcagtccggatgacggcattttcagccgttttccgctctcttcttcattggaaacctgaggctcctcctgattggtctttttctgaggagccgatccatattgtataaacagaacatacgctccgtaaataagcaaaaggataacgagagcccttgcaatatttttcaacctctcacccccatatcatcaaaccgttctgtttttgtgtactcttatacagtacagcctatttgcatcgtccgtgatttatgtttaatggataaacccctccggacctccgtcttcagaaatgtcagacagcgcccggcctgcttgctcatttgattgctcggccaacgaaagatcgccgagcgtaacaatgccgaccagttttttatcccttgtgacgggaattcttctgagctgatgttcagccatcaaatggagcacctcctccacagaggcgtcttcttctgcactgataacccgctctgtcattgcgtcggttattttttgagagttcggcttttttgaagcaattccccgtaatacgagatctctgtctgtcacgatcccgacaagtgtggcgccgtcttcatccactatcggaatggcgccgacatccgcgtctttcatcttcaccgcagcttcatatacattatctaatactgtacaatattgcaagtctgacgtcatgagcttattgatctttgtcattgcggaattcctccttttttctgctactattgtcgtcaaatttttgtttttgcatactttcaccgtatgaatcattgaaagtgtaacgctttcatactatgattgtcaggaaagggcatttttaaaaggagggggaaggtttgaagtttgaaaacagcggtcttgaaggggtaacagcggagctcagccgcttgaacgatctgatggaaggcaaagggctcattctggctggacaatgggattatgaaagagtgacttacgacaaaaagttttcagtacctgaggggacattttatctgcggattcaaggaacggcaaaagagggcgatgtcggcggcagacgggccgtgattcagctgaaggcccctcttttaggaaagcattattatccgcacggcgtagaatacggcagcgctgaagaatttccggaacatgtcatcgctgaaagcaaagctttactgcttgaattggaagagtcattaaaaacagtgcaaatgtaataaaaaagtacagcatattctgctgtacttttttttatgagacggtatgctcgatatacggcggctctgacagcgtatctttttcccgttccgttctgacccactgaaaaaagatgacagccaaatatattccgtagaccgcctcttgaatgattttcatcagcactgccccaagctgctgatcttccagaggaggtagcgtgttaaacatctccggcccggataaagggatctcctccagcaaatctaaaggaacgcaaagcttcattgcttcggcccaagccgccggatctgtatacgtggcatacatgggcgccccgctgaacataatgagcgcgcaggccggcgttaacaaaatcccgtccgccataatataccccagcttcattaaaccgctgagacggggcagaccgtccaccttatgcacaagcggccaccacataaaaaacgccgttacaaagatgagtccgttcatcagcgtgtgatacagcgaatccgttttgacgaaatcaaatataaacgggatgtgatacagcgaaaaaataccgttaaacagcactaaagcgataagcggcattgaaaaaaatgaaaacagcggctttacgacaggacggaagatcagttttttccatgcccagccgggaattccggagatcaacagcggcggtacgactaaaaacagaaccgccatctgcgccatatgggcgctgaacatcacatggcccaataaatcgaccggacttcccgcagccgcgtaaaaaaatagcgcggaaagcacaaacagcaccttctccttaacggccacacgtcctttatgccggctgcaccagtaaaagtaaacacctgttatcacggcagttatacaaaacagatacgggctccacattgcgcgaaacccgaacatttccaaattaatcaaatctctcactccccgccgccccgattaccaccaaataatcgtgacaaatgcaagcacggtgataaacgcgacaaatattcccgaatacagaaataatgacggcgcttcatgccccttctggctcatatgcataaagtaaaacagctgaaagatgacctgaatgaccgcaagcaggatcagaaacggcatcgtaaaccatccggcaatgccgtctgcagccaccgtcaaaaacgcgacaagcgtaaggccgatcatcaagccgaaggagatgacctgatatttcatctcctcggcatttttccttctccgatattcaagatccgtactgacagtctctctgtttttgttatcgtccatcgttatcccaccatccccatcaaatatacaacggtaaagataaagacccacacgacatcgataaaatgccaatataagctggccacataatatttcggcgcattataaaggctgagccctcttttcgcattccggatcatgagcgcgctgatccacaacagcccgaacgccacgtgtgctccgtgtgtgccgacgagcgtgtaaaacgctgagccgagcgcagagcttgtaatggtaaatccgaactcgtgagtgtaatgcataaattcatagatttcaacccctaaaaatcccgctcccaataatacggtaaccagaagccacacctgcatttttttaaaggagaaatttttcatatgatacatcgcatacacactcgttaagctgctcgtcaaaagaagcatcgtcgcgataaacacgatcggcagctcaaacatctcagccgttgacggccctccggctttagattcccgtaaagcaaggaatgtcgcaaatagcgaggcgaacagaaccgtttcgccgccgagaaacagccaaaatcccaaaaacttatttttcccctccagcgttgctttttcaggagaagccggaaaggtttcagccgtcattttttcctgcagctgcattacgccttcacccctttatcatcattcggcagatcttctttgtgaatatgatagccgtaatcatcgaccacagagcgaagcagcatggtaaagaatgtgatgccgagccctatgaagataaccggaagcccccatgaataatcggagtggtataaaaacccgaacgctgccacaaacagcccgaaagatatgataaacggcatgatggagccgttcggcatatgaatgtcctctacaggctctgcaggcgccatcccttcatttccggcctgcttttcaatccacagcgggtcaagtccccggacaaacggaagctgtttaaaattatattccggcggcggcgaagagaccgcccattcaagcgtacgaccgtccagccacgggtcgttcccgacgtatttcccctttattgaggtataaataatattgacgacgagtaaagcggccgcgcctgccatgaaaaacgcgccgattgaactgatcaggttgccggtatcaagcccctggccgggcagatatgtgtaaacgcggcgcggcattcccatcaagccgagaaaatgctgaatgaagaaggtaagatgaaacccgataaaaaataagacgaacgaaattttccccatcgtttcatgaagcaccttcccgaacattttcggccaccagaaatgcacgcccgccaggatgccgaacacaacgccgccgataatgacgtagtggaaatgcgctacgacaaaatacgtatcgtggaactgataatctgccgctgcggccgccagcatgacacccgtgactcctccgagtacgaaagaaggaataaaggcgacggcatacagcataggcgtcgtgaatttgacgtttcctccccagatggtcaaaagccagttgaaaattttaatgccggtaggcaccgcgatcgccatcgtcgcaaccgcaaatatcgcattagcgatcggtccgagtcccgttgtaaacatgtggtgaacccataccatgaacccgagaaagccgatcagcacgatcgcaaagaccatagacgaataaccgaacagacgtttcctcgcaaatacgggaatgatttctgaaaaaatcccaaaggcgggaagaattaaaatgtatacttccggatgcccgaaaatccaaaacagatgctcccagattatcgtattgccgcccaattcaggattaaagaaattcgttccgaacaaacgatccagcatcatcagcgccaaaccgacggtgagcggaggaaatgcgaataaaatgagtgccgacgccacaaatgtcgtccacgtaaacagcggcagtctcatatacgttaaacccggcgccctcatattaataatcgtggcgagaaaattgatccccgcaatgagcgtacctaagcctgatatttgcaggccgagcacgaaaaagtctatgccgtgccctttcgaattcagcgcaagcgacgcgtacgacgtccagcctgcatcaggagcgccccctaaaaaccagctcagattcaaaaagatgcctccgaagaaaaacagccaaaatccgagcgcattcaaaaatgggaatgatacgtcacgcgccccgatctgcagcggcacaaccgcgttcatcagcccgaataacagcggcattgccgccaggaagatcattgtcgtgccgtgcatcgtcataatttcattaaactgctgagcacccataaaatcgttccccggcctcaagagctgaatcctgataagcatggcctcaagtccgccgacgacgaagaaaaatcccccggcgatcatatataaaatcgcgattttcttatggtcaaccgtcgtcaaataatcccaaagcaaagagctttttctttgctgtcctgtaagcgtattcatcatttgcgacctcccccctgatatctccctgtcctcacttgttctccgctttcagcccttttaaatattcatacagcgcatccgtttcagcgtccgagagcttcggataagtgcctgtcattttattgcccggtttaatgctgtccggatttttcagccaggcttttatattctctttattcgcatccttaatgccggccactttgacccgttcaccgaaggtagcgaggttcggagccgttcttgccgcttcagcccgtttatcattgggctcaaccgcatgacagctcaggcagtttttttccttaaacagctcttctccttgtgctgctaaatcggaatctgttgtatgcttataatttttcatcgctttcgtccattgtttaaattcttttgacggcagcggtttcactttgaaatccatcagcgcatgtgaaggtccgcacagctctgcgcatttcccgaagaaatattctcccgcttctttgctgcgtttagaatcgaaggtcagaaagaaagtgttgtcattatccgtattcgtatcgatttttcccccggctgacggaatccagaaagagtgtttcacatctgaggacttcagcttgaaatagacgcgttcatctgtgggaacgatcagctcctgacttgtcacaaacccgtaatcgggatactcgaattcccaccagtataaattcgcccttacattaatcacgagcgcatcctctgctttacggtttttcttatccatcggcgacgtatccgccagtgccaatgtatcgatgacaaccggaatgacaagaataatcagaagcaggatcggaataacggtccaggtgatttctaaaaaacggttcccctccacctgtttcggtatcgtgtcttcccctatacgcgaccgtctgaatctcacaatgacgtaaaagaaaataactgctacgaccgcaacgacgacaaccatgataagtgtgctgagcaccgtcagatcatattgtttatcagccacttcgccggcaggcttgagtgtggacagaaacggttttccacagccgctcaataaaagcggcactaaggctaataatgataaaagacgccaacgctttaacatttcacccaaccccttttttgaatcagtacgagatgcacaagcagtaaatctgcttccagccgaaatacttcatttcctcatttcttaaaatatgagattttttacttaaaattccatctatgtataaaagcaaagccgcctgattaaacaaaaggtcaaggcggcgtttactagttgtcattgtttgttttggcgatcaaacaagctcattattcaattaaaacagcgtgaagaccaccatcgctacaaaataaatggtcatgtagttaagcgaatagacaaacataagggttgcccacttcatgatgtttttcatgcggaatcccatcagtccgagaacaagccatccgacattcagcaaagtgccgagaatgacgatcggaagaccgagactgccgaggaaaaacggaagcggcagcaggcatgcgacccagacgataatctgtcttttcgtcacttcaaagccgtgcactaccggaagcatcggaatattcgctgctctgtaatcttccgtctttttaatcgcaagcgctaaaaagtgcggaatctgccagatgaataaaatcatgaataaaacccacgcgacaacaccgatgtgcccttcaaccgctgtccagccgattaacggcggcacggcgcctgatacacttccgacaaccgtattaatcgtataacggcgtttcgtccacattgtataaagaacaacgtacgtaaacacgccgataaaaccgatgactgctgccatcacggtggtcatcaaaagcatgataagtcctaaagcaatgagtaaaattcctgaccacagcgcttgattcggctgaatctttccggttaccgtcggtcttactttcgtgcgttccattaaatgatcaatatcacggtcgtaatagttgttaaccgcacaagaaccggcgatgatcaaagaagatcctattaatgtaagaagcacggtgtttaaattgcctaaaaaactcagaccggatatatgtaacgcaagccacatgccggtaaaagtcgtaattaaattcgaattgacgattcctattttgataagcgaaaggaaatccttccatgccgtcgtctcttcaatctgtccgtctatagctgtatcgtttaaaattctggaattagccataacgtaaacctcccttacaaacctaaagcaggttttttaagacctgcaactctatcatacaagataatgacctgtaaaaaaacatcctcttaaatattaaacgagaaacaggaatttatttgtgaactttttatgaattttaccaaatccgccggcttcataataaagcggttactttatttctatcagacccatctggaataatcaaccccattatctaagaagtcctgattctattatatttttgtgaacaaacagaattgagaattgccacaaaacacatattcgcttacacttggtacgtatatcattttgtccagtttgttaagaaggtgaatgtaaaatgaataaagctttgaaagcgctcggcgtgctgacgacgttcgttatgctcgtcgtgctgatcggcggcgctcttgtcacaaaaacaggatcgggtctcggatgcggaaggcagtggccgctttgccacggccggtttttcccggagcttaacgccgcttctatcattgaatggagccacagactcgcaagcggtgtctcaatcgttctcgtgctgagtctcgctttttgggcatggagaaaagtcacgcctgttttccgtgaaacaacctttctcgccattatgtccattatctttttatttttacaggcgcttctcggcgcattagcggttgttttcggatcaaatgcgctcgttatggcgcttcatttcggcatatcgctgatttctttcgcttctgttctgattttgacgctgctcatatttgaagctgataaatcagacaaaaagctcgtcaagccgctcagaatcggcaggaaaatgcagtttcatatgatcggcctttcgatttacacgtatatcgtcgtttatacgggggcttatgtgcgccatacaaaatcaagccttgcctgtcctgacgttccgctttgcagcagactgaaccacggacttccgtctcattttcaggagtgggtgcagatgggccacagaacggcagcgctgcttctgttcgtatggattcttgtcgcttttgcgcatgcggtgcgctcctacaaagaccaaaaacagattcttgggggctggatagcggctcttgcctttgttgtattacaggcgctctccggaatcatggttgtttattcagaaatggccaccggctttgcacttgcccattcgctctttattgccggtctgttcggtgtcttatgctatttcttattattaatcgcccgcttccgctatgaatcaaaacagcggaacatctgaggcacatgaaaaggccgaagcatcaaagcttcggccttttcacatataaaaaacctgatcgcacacggggcggatcaggttttttatgtttattttttacgctttttcaatttcgatcagtaaatcgcctgtctgaatcggttcaccgtttttcacatgaatctgctgtattgtcccggagaacggcgcctgtaccgtcgtctccattttcatcgcttcattaatcatcagatgatcgcctttattcacctttgccccggtttccgttaacaatttaataaccgttcccggcatggatgccgcaatgtggcttgggtttgtccgatctgcttttaatttttcctgtacggacgatttaatgctttcatctttaatgaccacttcgcgcggctggccgttcaattcgaaataaacgacacgtgtcgcatctggctgcggttcaccgatagatacaagcttcacgatcagcgtttttccgcgctcgatttccacttcgatttcttcaccgagtgtcatgccgtagaagaaagtcggtgtgtccaatacggaaatatcaccgaagcgttcagccgttttaacatattcagtaaatactttcggataaagagcatacgcgattgcgtcctgatcactcaattccatctgatgcgtttctttccattcttctttaatgccttcaaaagataccggttcaagcagctcacccggtcttaccgtgatcggcgtctgtcctttcagaacgagcttttgcagtttttccggaaatccgccgtgcggctgaccgatctgccctttaaagagctcaacgactgaatccggaaaatcaagcgtttcgcctttatcataaacatcttgttctgttaaattgttttgcaccatgtaaagcgccatatctccgacgactttggaagaaggtgttactttcacgacgtcgccgaacatgcggttgacaacgctgtacatgtctttcacctcattccagcgatcgcccaggccgactccttttgcctgctgctgcagattgctgtactgcccgcccggcatttcatgattataaatctcagtatgcggagacttcatcccgctttcaaattcactgtaatactgacggacggattcccaatattgtgacagtctttccacctgccggacatccatttcaggacggcggctgtttccttcaagcgcatgataaaatccgcttgcgctcggctgtgaagtcagacccgccattgagctgacggcgacatccacgatgtccacacccgcttcaacagctttggcatagagaaagacgccattgccgctcgtatcatgcgtatgaagatgaacgggaatatcaatcgtttccttcagcgctgagacaagttcgtatgcggcttgaggtttcaaaagaccggccatgtctttaatgccgagaatgtgcgcaccagacgcctcaagctctttcgccatagaaagataatattgcaaatcatatttcgtccgggtcttatcaagaatatctcccgtgtaacaaatcgcagcctccgccacttttccggtttcacggacggcatcgatggccagcgtcatcccttttacccagttcaggctgtcaaagatccggaatacgtcgataccggactccgctgactgccggacaaatttttgaatgacattgtcgggatagtttgtataaccgacggcatttgatgaacgaaggagcatctggaacaatgtgttcggcacttccttacggagatcttcaaggcgtttccaagggtcttcttttaagaaacggtacgctacatcaaatgtcgcgcctccccacatttcaaggctgaacagttcaggccacagggcagccgtaggattcgcgatttttttcaaatcgttggacctgatccgtgttgcgagcagggactgatgggcatccctgaacgttgtatcggtcaggagcacggatttttgctctttcacccagtctgcaagtccctcggcgcctctttcatcaagaatctgtttcgtaccgcttgccggcttttccccgatatctaacgtaacggtctgaggcttatcaaatgcaggtttttcttttttcccgattcccggaaaaccgttcaccgtgacattgccgatataggaaagcatttttgttccgcggtccttctgttttgggaaaacaaacagctcaggcgttgtgtcgataaacgatgtgtcgtattggcccgtcaggaatttttcatgctttgccacgttttcaagaaacggaatattggtcttaatgcccctgatcctgaattcctgcaggttgcggaccattttcgctgatgcctgttcaaacgtcagcgcccatgtcgacagcttgacgagcagtgaatcataataaggtgtgatgacggcgccctggaagctgtttcccgtatcaaggcggacgccgaaaccgccgcctgagcggtaagccataattttacccgtgtcaggcataaagtcattcagcggatcttcagtggtcacacgtgattgtatcgcatacccgtttgtaaaaatgtctttctgctctgggatattgacggcgcggctgtgcagtccgtggccctgcgcgacgagaatctgcgtctgaacgatatcaacccccgttatcatttccgtaatcgtatgctccacttgtacgcgcgggttcacttcaataaagtaaaattcaccgcccgctacgagaaattccacggtccccgcgttgatatagccgacatttttcgcaagcgccacagccgcttcacagatttcgtcccttaattcaggctgcaaagatacactcggcgccacttcaatgaccttttgatggcgtctctgaacggaacagtcccgctcatacagatggacgacattgccttctttatctccgatcacctgaacttcaatatgcttaggattttcgatcagtttttcaacatacacttcatcatttccgaatgcggctttcgcttctgatttggcccgctcaaacgattctttcaattcgctttcgcttcggacgattctcatgccgcggcctccgcctccgagcgatgctttaataataaacggaaatccgtggacttttgcgaattgttcgacatcttttaatgtttcagccggtccgtcactccccggaataacggggataccggctttttccgcctgctccctcgcctttaccttatctccgaacatatccaaatgcgctgacgtcggtccgatgaatacgatgtcctcttcttcacagcgtctcgcaaattggatattttcagagagaaatccgtagcccggatgaatggcatcaacgccgtttctttttgcgatctcaataatcccttcaatatcaagatacgcgtcaatcggttttttgccttcgcccacaagataagcttcatccgctttatagcgatgataggagcccgaatcttcttttgaataaacggctaccgttctgatgttcaattctgtgcacgcccggaaaatccggatcgcaatttctcccctgtttgctactaacactttttggatggattgttgtgacaaacttttctcccccttggcctaataaatatgtagtttataataaaggaatatccgccctgtgtatacacttgttttttagagatacacagatttttccgtctgccgtctttttacccctttagacggaacgggctccctctttttcttcttttctgagtacttgacatgcatgctgacattcaccaatataccggcgctcgtcaataacaaaaacattgatgatcccccgtagctgataaacggcagcggaacacctgtgatcggaattaaaccgctgacaccgccgagattgataaaggtctgaatcgcaatcatgctggatatcccgattgccaaaaggcttccgaacggatcttcacattttctcgcaatataaaaaccttttaacaccacaaaagccagcagcacaatgacaaacaggacgccgaaaatgccgagctcctctgaaataaccgccataataaagtctgtatgcgattcaggcagataaccgtatttttgaatgctttctccaagaccgagaccgaaaaaaccgcctgagccgatcgcataatacgaatttataatctgcagacctgatgtgctggcgtatttaaatggattttcaaggctttcaaaccggctcatacgcccgggtgtcaaaatatcgtcccatttcagataaatgatcgggctgacaaggagtaatacgattcccgccatgagaaccagcctgagcagggtccttccgctgaatcccgaacacataatgacgcaaaacgcgatcagaccgataatcatcgccgttccgaagtcgggctgaatagcgataagcgcacaaatgactacggtgacgatcaccggcggcgcaacccccgtcaaaagctgatcgatgtagctttgtttctttgcgtacaccgcggcaagatacagtatcagggtcagcttgacaaattcccccggctgaatggccattccgccgattttaaaccagctttgcgcatttccggcaacatgtccgaaaacaaacagcgcgcaaagcgcagccactgacgcaagcagtatgattttctgaatcttttgatgggcgaacactttgtacggaaaaacggccgcgataataaacagcacaaaccccgcgatgacggcgaacagctgccgtttaaagaaatagtcgctgctcacgccgtaacgcataacggcggtaatcatgcttgagctgtataccattaccaatccgaaactgcacagcagaatgatagcgcatatcaatgaataatcgtaagattttaacattcttttaaacataacatcctctttcctgcttaaagcttacgtttaatacctattgcgtattatattttactataattcataaacaatttacgcagtttctttatagtttttcggatgaaatgcagattaagagaccgtcttacgaaaagaagatgcaaaaaaacggtttacggttataaaaaaacccaaaccgttgaatagtttgagtttgatcatttattttcctgtaaacgcgtcatgcaaagcagacagttctctttcaagtctgtccagcagctctttgccgtcgttttcgtcaactaatcccaggcggacagcaaaatcgatttccctcgacagtccgaacatctgagtatccaagacctcttcatacagaggacattgaggcatcgttaagttatccatttgtactcggatcagcttcaaaatcttctcagcatctaacttcaacagctcgaatgctttctgctgatggtcaactataatctctgaagccaaaagtatccctccgttccccaggcgagtacctaattcttctatttatcataaagggtatcagatgaaattgcaagaggatttaagcagatgttatgataaaaaatgtttcaaaaaatactcagcctgtatttctcagacatgatttccaaaagcttcacacccgcgatgctgttgcctttttcatcaagcgccgggccgaatataccgattccgaagttgtacggcgaaatgcccatgattcctcccgaaacgccgcttttagcgggaatgccgaccttgattgcgaattccccgctcgcattgtacatgccgcatgtcaccataaacgtcttgcagattctcgccacatcttttttaatgacctgctccccggtttccggatgcttgccgtcaagggcgaatacacagccgattttggctaaatccagactgctcatcttaatcgcgcactgttttgtatacaaatccatgacctcttcaacatcgcctttaaaaatgtcatactgcttcatgtaataacacatggcccgattaatcatggaagatttgaattccgattccgcgacatgtctgcaatatgtaatgtcctgattgttcgcaagtcttctgatgaatccgagcaggtaatccaggcggtctttcggcgaatgccctttaattaaacccgtaacgatgagagctcccgcattaatcatcggatttaaaggcttgcccggattcactgtttcaagcttaatcatggagttaaacgggtcgccggtcggctcctgacccacgcagctgaacaccttttcctttccgtaatccatcagtacgagcgccagagaaagcactttcgaaatgctctgcagcgtaaatgtccggtcggcgtctcctgccgtcagacatgtattttccgcatgataaatcgtgaccgaaaggctgtcttgttcagattcagccagagccggaatatagtctgccactttgccttctccggttctttttttcgcttcctgaactaatgcgtccagctcttggtaatgccggcataccatgtcgatcatcctcacttcgctgccgttgtatacatctaatttgcaacgcaaagtgacaattcatgcgaaaacttttatactttaagtaaaggggggcttcaacatgagcgttattcaagtaaaaggcaatgttacatacccgattacaattgatccgagtgtctggattttcgatgaccgcaaatttccgtttgaaaacaatcagcctgttcatcaggacggctctgcagaaacccaggagcatacgcttgatcctgaacgggtgatcagagaagggcgcatttcgccgccgactttaaaaagtgaaaaacgttatgaaaaagaaagactgatgaacggcagcttcgccatgaagctcggcgctgttttagcaaatgccgagccgaaagaaagcgctgtcctgtgcgcatttatttcaaaatcagaaagaaccgaagtgccgcttgaaaaggcgatggacgcaatcgcgcatttcagcgatgcggggaaaccgcttcaagacggcggtccggtccatttttacgtggacggagactttgaaaaaccgataacgggcgtcacagaaatcgaagttttataacaaatcggcggcaagctgtgcaaggccggatctctcacctttcacaagcttcacgctgccggagacggtttgtcctttaaaccgctctacaacataagcaagtccgttgtttaaactgtctaagtatgggtgatctatttgctccggatcgcccatcaggacaattttgctgccctctcccacccttgtcaaaagcgttttgacctcgtgcctcgtcagattctgagcctcatctataataataaactgatccggaatgcttcttccccgaatgtatgtcagcgcctccacctgaatcgatccgattcctgccaaaatcgcttcaagttcacccggctttttcgcattgaataaaaattcaagattatcaaagatcggctgcatccacggcttgagcttttcctctttttcgcccggcaaatatccgatatcctttcccaccgggacgatgggacgcgcgacgatcagctttttataaataccgagatcctccgtctgcagaagccctgccgcgagagcaagcaaggtttttcccgttcccgcttttccgatcagggtgacaagcgggatatcttccctcagcaggagttcgagcgccattgtctgctggacgttcttcggcctgatcccccatacgtgctcatcatcgaaaacgagtctttttacggtctctcctttcttatccgccatgccgaccgcagacgaagatcctcctaattcatctttcatcagcacaaattgattcggataaacctgatgctgctgaagctccttgactggaatttgtttgtttttataaaacgaggcaaaccgctctttattcataaatatatctttgtacccgctatatatttcatgatggtcaacgactctgtcgtttaaaaagtcctccgccaaaagcccgatggcatccgcctttaccctgacaagcacatctttgctgaccaggatgacgaggcggccgttttctttcgtttcctcctcaaggcttaaattttttgccaccgccaaaatgcggttatcattcgttttttcgataaaaatttcttggagctgatgaaatgaccggtggttcagttcaattctgagcgttcctccgctttgaagcggaactttctcgtgcagccttcctttctccctgagcccgtctatcagcttagatacgtgcctcgcatttctcccgacctcgtccatataccgcttttttgaatcgacctcttccagcacgacggcggggatgacaacttcgttttcttcaaaggaaaaaatggcgttaggatcctgcaaaagtacattcgtatctaacacataaattttactcaagtctcagcctcctgaaataaggatcaaagcccatcgtgtgcttctctttccgcgaaaaacggggatgcctgctaaaatatatgatttggtgaataaagatagaaggttaattcaacaataaaataaatgaaagcattcaaggagggaatctgacgtgcgaattcttttcattatcatacaagccttgtttatcctgaccggctgcactgctgtacaggacggccgcggccgcaatatccagaacgaatcaaccgatcagcgtgatgcaaaaccgattcatgtaaaaaatacggctcctgagacagctgaaaatcccggccggacagacatcgctaagcatctcgtcgaggtaaccgaaaaaatccccggcatttcagatgccaccgcggttgtactcggaagatactccgttgtcggaatcgatgtggatgacaatttagaaagaagcaaagtggagagcattaaatacacggtcgcccaggcgttaaaaaacgatccttacggcgccaatgccgttgtcgtggctgatcctgatacggtttcccgtctgagaggcatgggcagcgacattaaagccggccgccccgtttcaggcattttggacgaacttgccgccatcgtcggtcgtgtcatgccggaagtcccgaatgatgtgaccgacaatgaaaaagaatcaccgactcaatcgaatgatgatcagctgaaccaaagagaccagaacaagctgcagaacgaacagaacgatcaatcggatcatcatatgaaaaaccgccagtaaaaagcagcgcccgctccaaaagaagggcgctgctttctttccctttggcaggaggggcatccatgatataatgcttgtcatagtgaaagaggtgaaaatcaatgagagtaaaatgttccatttgcgacaaaattgaacaaattgatgatgaaacactgacagccaaacgcctccgcaatcgtccgattcatacatatatgtgccgggaatgccatgaccgaatcaaaatcaaaacggaggcgcggctgaataccggacacttttcctttcatcctggacaaaaagcgaaaaaagataaactgaaaaaataaaccgcaataaaaaatgacccgccggaaggcaaggtcatttttttattgcggtttagctgactggctttttttggactggtgcagacggattttgtaaatgatcaaaatcaaggcggcgacaacaagcccttctccgaccggcaaaaacacaccgaaaaaagtcagcacggtgcagccgagcacgagaaagagataaactgccgcagccttcaaaaccggcagccgtttggcaaagccgagtttaaatacaatcaccgaaagcacgacgatcgttccgtataacagccacattcccgccagcggatgctcatccacttggtaaagagccgcaaagaacgacagccgttcacttacttcattcaaaaagatccccctccccttttccgttcgggttctaccttttcaaattctgcaagtgattaagacattcctgctgtttttttctttttcgccgctttttcacgttcgtttttattcaggattttctttcttaaacggatggattccggcgttacttcgcagtattcatcctcgtttaagtactcgagtgattcttcaagcgacataatgcgcgctttcttaatcgtagtcgtttgatccttcgtagcggaacgtacgtttgtctgctgtttcattttgctgacattgacaacaaggtcattgtcacggttatgttcgccgacaatcatgccttcatacacttctgttccgggctcaacgaagatgacgccgcggtcttcaataccttgaattccgtaagatgtcgcttttccgttttccatggaaacgagcacaccctgacgtcggcctccgacttggcctttttgcatcggctgatagctgtcaaacgtgtggttcaggataccgaaaccgcgtgtcagtgacagaaactcagtagaatagccgatgagtccgcgtgaaggtacggtaaagatcaggcggacctggccgtttccgttattaatcatatcaagcatttcgccttttctcgcacccattgattccataacagaaccggtatgctcttcaggcacgtcaatctgcacgcgctcaacaggctcgcagctgacgccgtcaatttccttaatgataacttcaggtttagacacttgaagctcatagccttcacggcgcatgttttcaattaaaatggacaggtgaagctcaccgcgtcctgaaacaacccatgcgtctggtgatgcagtcggttcgacacgaagactgacgtcagtttgaagctgcgcattcagacgctcttcaattttgcgggctgtgacatatttgccttcacggcctgcaaacgggctgttgtttacgacaaatgtcatttgaagcgtaggctcatcaatgcgcagaaccggcagcggctcatggtggtcagccggacaaaccgtttcaccgacgttgatgtcttccatgcccgaaacggcaacaaggtctcccgctctcgcttcttcaatttccacgcgtttcaatccttggaaaccgaagattttcgttacacggaatgatttaaccgttccgtcaagtttcatcaatgaaacctgctgacccactttcatcgttccgcggaaaacgcgtccgataccgatacggccgacataatcattgtaatcaagcagcgccacttggaattgaagaggctcttcggcgttatctaccggggcagggacatgttcaagaatcgtttcatacagtgattccatgttttcgtcctgctttttcggatccagacttgccgttccgttaatcgcagaagcgtagacgacagggaactcaagctgttcttcgtttgcgtcaagctcgatgaacaaatcaagcacttcatcaatgacttcttccgggcgggcgaaatcacggtcgattttgtttacgacgacaaccggatttaagttctgctcaagggcttttttcagtacgaaacgggtttgcggcatgcagccttcataagcgtcaacgactaacagaacgccgtcaaccattttcataatccgttctacctctccgccgaagtcggcgtgtcccggagtgtccaaaatattaatgcgtgtatctttatagttaatcgcagtatttttcgcaagaattgtaataccgcgttcacgttcaagatcgtttgaatccattgcgcgttcggcaatattttcgttggcacggaatgttccggcttggtgaagcaattggtctaccaaagtcgttttcccatggtcaacgtgggcaataatcgcgatgttgcgaagatcgtttcgaagtttcacattttcatctcctaaaaaaattagataactttcatattataccacacatcctctttaaaagcgttacgtttttctgtaaactgaaagtatgacgttaaaggggatggaaatatgaaaaaattgaattggctcttattattatttgcattcgcagcagtcttcagcatgatgctgatcggcgtatcaatcgctgagaaaagcgcatggggcatcatcggaagcattgttctcgttatcgccatgatgggaagcggtttcaccgtaaagaaaaaaatgcgcgaacagggactgcttgattaaaagcatgaccctttgcaaaattccgtaaacatggaaagacaatatcttatgaagcctgaatcaaagattcaggcttttttacctcctcaaaaacagactccagatgtaaggcttatctcccccgccgtctagtcaggaagccgggaatgacggcccccattctagttacatcagcagattccctcagaatatacagtctgaaatagtccggcatcgttatgcagaaaataccatacctcctatatcaattccatcattgtctttttatacttgtgactgtaagcaaatacacatgacaaggagagaatgaaatgaaaacatcttttttgaagaaaaccgctgtaactgccgccgcaaccgcctcagccgccttgcttgcattcagtccgcttgattctgccggcgcaaaaacgatccaggcaaatgaaccgcataccctgcaggtttccgcagagaaaacaccggaagacgcggcaaaactcattgacatcatcagccaatcgatttacgaaaaagacggcgtctattattttgacggtgaaaaagcggttgaattgggattagataaagaagccgcacagaccattcaaaagctgtgggacagttcaaccgaatttttaaccgttctttctcaatgtattgagaaaacggacggcgaatatacatttaataaagaaaaagcggtggagctcggatttacggaaaaagaggcccttatcgttgatcagctgttcaccactttttcccaaagtcttcatatccttcaatctgcgctgattgaagaagacggtgtgtatacgtttgatcaggaccttgctgaaaaagcaggagcaggaaaaaaagaagcaaagctgtgtgccggattctttaattcactgcctcaggacttgcttgaaggcatttatacagcctttcatccggctgagtaaacggataaaacgcccggtcatgtcatgcagccgggcgttttttttaatcagcagtttaaagatcagcatgataaagaaaacagcgccgaacaaacaggctgcttttatcagcagcttcccgtaataccgttccttaaaccgcctttcttcttctgcataacaggcgggctccttcatctcggggctgccgaggtcaagcggctccttcatcatatgatataaactttcgcacttaccgcatgattcaaggtggcgggaaataaaccgctccgtttctgtttcacaatcgccttcaatatatatagggagtaaatctctcactaaacagcaagtcatatctgtccgtccttccttttttccgctaagtgctgtttcagctgcattctcgccctgtacagagtgctcttcaccttcgaaagactccagtccaaaacatcagcaatctcttcgtaagacagctcttgaaatatctgtcgaaatgctgaataaaatgactgaaaatctctgacatctgaaacaatccttttcgtttattaaggcctcacctgtttagacaaacggctataaaaaaagttttacagatcggaacatttttcctctattatttctcccgacttcatttgtcatttttttcagaataaatcgcatcattcgactcatgtttgattcaacacgtgcctctcggcttatcccctgacgctgcccgcctgaagcctttacgggacgattctatcaattcatcagcgaagtctagttttatattgcagaatgagagaatgctggtttattataacaatataagttttcattattttcaaaaagggggatttattgtgggtttaggtaagaaattgtctgttgctgtcgccgcttcctttatgagtttaaccatcagtcttccgggtgttcaggccgctgagaatcctcagcttaaagaaaacctgacgaactttgtgccgaagcattctttggtgcaatctgaattgccttcagtcagtgacaaagcaatcaagcaatacttgaaacaaaacggcaaagtcttcaaaggcaacccttctgagagactgaagctgattgaccacacgaccgatgatctcggctataagcacttccgttatgtgcctgtcgttaacggtgtgcctgtgaaagactcgcaagtcattattcacgtcgataaatccaacaatgtctatgcgattaacggtgaattaaacaacgatgcttctgccaaaacggcaaacagcaaaaaattatctgcaaatcaggcgctggatcatgcttttaaagcaatcggcaaatcacctgaagccgtctccaacggcaacgttgcaaacaaaaacaaagccgagctgaaagcagcggccacaaaagacggtaaataccgactcgcctatgatgtaaccatccgctacatcgaaccggaaccagctaactgggaagtaaccgttgatgcggaaacagggaaagtcctgaaaaagcaaaacaaagtggagcatgccgctgcaaccggaacaggtacgactcttaaaggaaaaacggtctcattaaatatttcttctgaaaacggcaaatatgtaatgcgtgatctttcgaagcctaccggaacacaaattattacgtacgatctgcaaaaccgacaatataacctgccgggcacgctcgtatcaagcactacaaaccagttcacaacttcttctcagcgcgctgcggttgatgcgcattacaatctcggcaaagtgtatgattatttctatcagacgtttaaacgcaacagctacgacaatagaggcggcaaaatcgtatcttccgttcattacggcagcagatacaataacgcggcctggatcggcgaccaaatgatttacggtgacggtgacggctcattcttctcgcctctttccggttcaatggacgtaacggcccatgaaatgacacacggcgttacacaggaaacagccaacctgaactatgaaaatcagccgggcgctttaaacgaatccttctccgatgtattcgggtacttcaccgatactgaggactgggatatcggtgaggatattacggtcagccagccggctctccgcagcttatccaatccgacaaaatacggacagcccgaccattacaaaaattatcaaaaccttccgaacactgatgccggcgactacggcggcgtgcatacaaacagcggaattccgaacaaagccgcttacaacacgattacaaaaatcggagtgaaaaaagcggagcagatttactatcgcgcactgacggtatatctcactccgtcatcaagctttaaagatgcaaaagcagctttgattcaatcagcgcgggacctttacggctctcaagacgctgcaagcgtagaagcggcctggaatgcggtcggcttgtaaacaagaaaagagaccggagaaatccggtctcttttttatatctgaacatttcacaatggcttcaccatgatcatatatgtcttttcccgatcgtctttttcaagcttaagctgttcaaagccgcattggcttaaaaacaaaacccattcctgcctgtccaggggaacggctgaaaacatcgctttatgctctcctctcagccggcccgcaatctcttcaatgaccgcgcgaccgattcctttctcttttgcctccggagcgacggccacggttccgagccacggttttccgtttgaaggcgcccattccaaatgaaaactgacggcggcaggagcgccgtcaatctcccatacgagccacgttccattgtacatggagtatgcaagcataaactccgccgcattttttgttccgaactcttcgtttttccacaccgggtgtgatgccgccagctgctccagaaacccgagatcttcttcttcaaaatctctacctgtcagcatgtaaatagtcgtcaaagataattttatgtatagccggattgcccgcaagcacgctgtggttgtctaaaaacgtgaacggttcgccgtctgtggtcgtgtaaatgcccccgacttcgttcagcagcacgcagccggcagcgtaatcccacggcgcgagcctcatcgtaatgtatgcgtcaatgcggccggccgcaacaccggccagctcaagtgccgccgaaccgtaggaacgcgttcctctgacccgttttacgagcggcgccaaaatactcgggtcaatccttctgttttccgtcacccatgtggcattgattgcaataatggcttcttcaatggaagcttcttttaaaggagcaagcggcgtatcattcagataagccccttttccgctgaatgcgtgatacagttcgtcctgcatcacatcataaattaagccgattttgccttttccgtcttcaaagatgccgatggagatcgcgaaatgccgcttttgatggacaaaattcatcgtcccgtcaatcggatcaatgatccagacgattccgtcaagggagcggagtttatccccctgcccttcttctccgagaatccggtgtccgggaaaagttccttgtatacggtcaatgaaaaagcgctccgtctctttatcaatatttgtgactaaatcattcggatttgattttgtttcaatcgtcaagctttcctgcatggattgtctgattctcgttccggcttcttttacccattgttttgcgatatcatcaatttccgtccaatttgtcataccgtgtacctcttttctatgtatagcttattctatagcatactgataaaggcgatgaaaaagcaaggaaaatgaaaaaaatgccttctcacgtaaaaacgaaccatttcctgcggttcgtttttactattctttatccgttaagccgaatccattcttttctgagacgttccagttttcttttgctgagatcgatttgatcttcattctctttttgcatggcctcgtacagggttgccaattcataatcaacctctagtctccagacagctacacggttatttttttcctccctgaatccttccttcaccacttgcctcattgtctttcgccccttccagagatcatttgttaaaaaagcatcccatttttccaattcattaatgatacttcttatatcgtatggaaacttatattcggctgtaacaacattcttaaaattgtgtgtttacctattcgttttttaccaccattcctctcgactcaaacgttctcaatgtttttgcggcgggcggcggctgtggtaaaatatgaatacttacgttaaggaggaaaaagatgactcagatgcgttttacaaaagaagacttcgatacatttacaatagaaggtttagatccgcgcatggaggtgttaaaagaacaagtccgtccgaagctgaccttgttaggagagcatttcgcaccgacattgtcagcattgacaggagatgaaatgttcccgcatgtcgccaagcacgcgagaagatctgtcaacccgccggctgacagctgggttgcctttgccaacagcaaacgcggctataagaaactccctcactttcagatcggtttatgggacacccatatgtttgtatggtttgccatcatttatgaatctccgataaaagaggaatacggcagattgctggaagcgaagcaggaggaaatcacaaaacagattcccggtcattttgtatggtcgccggatcatacgaagccaggtgcgtacaagcagtccgacatggatcaggagcagctgaaaacattatttgaacgcctgcagacagtgaaaaaagcagagcttttatgcggcattcagctgcaaaaagaagacgtgatcaacatgaacaacaatgaattcctgcaaaccattgaagatgcttttaggaagctttcctttttatacacactgactcagaaagtctcataacataaaaagcgggccgattgccggctcgcttttgtctacattttgataatcgcttgatctgattgtttcgcctgtttcacagtccgatacggggaataggtgctgtcagcttcaaattggctgcagattttcttttcttccgctttcccgggaacgatttctttaaagcggcggtacgcattcagaagtctgtctcggtcagctcctttttcataggcgttttccacctgctgaaaaaaagcaatgacatccacggcctcctctgtcgtccagtcctcattcatcggatattgatattccaaatgtcttcactcctttatcatcatgctcaaaaataagcatcttccatagatcataaattgttctttactttctttcaagttcataatataattcatttgttttacgtttaaaaaacgggtaataaaactgaatgtaatacaaactaatccgtaggtattatgataaaggtgggaaaacaattgccgcaacatgaaacacccctgtacagcggactgaaaaagcacgcggacagacagcctgtccaattccacattccgggccataaaaaaggcgcgggaatggatccggaattcagacaatttatcggagaaaacgcgttaagcatagatttaattaatattgaacccctggatgatttacatgcgccaaagggcatcattaaagaagcccaggatctggccgcggaagcattcggcgcagaccataccttcttttccgtacaagggacgagcggcgccattatgacgatggtcatggccgtatgcggacccggagataaaatcatcattccgagaaacgttcataaatccattatgtcggccattgtattttccggagcggtgccgatttttatacacccggaaattgacgatgagctcggaatttctcacggcattacgcttgagtccgccgagcgggctttgacggaacaccctgacgcaaaaggcctgcttgtcatcaatccgacatacttcggtgtggcagctgacttgagcagcattgtaaagctcgcgcattctttcgatgtgcctgttcttgtcgatgaagcgcacggcgtgcatattcattttcatgataagcttcctctgtccgccatgcaggcgggcgctgatatggcagccacaagcgtgcacaaattgggaggctccctgacgcagagctccattttaaatgtgagagaaggccttgtttccaaagaaagagtacagtcgattttaagcatgctgacgacaacgtcaacatcctatctgcttctcgcttcactggatgtcgcaagaaaacgcctcgctacagaaggccgcgatcttcttgaagatacgattctgctggcggatcagacacgggaacgcctcaatcaaattgaaggcatccgctgtgtcggcgaagaaatcactgggtcaaaagctgccttcagttatgatccgactaaattaatcatttcggtcaaaaacctcggcctgacgggtcatgacgttgaaaaatggctccgcgaatcatttaatatcgaagtcgagctgtccgatttgtataatattttatgtattttcacccccggagacagagcaggagatgccgaccgtcttgtaagcgcgcttacagacatttcaaagcaggcttccgcaaatgattatgctcatcagcaaacggaagttctgcttcctgagattcctctgttagcgatgacgccaagagacgcgttttacgcaaatacggaagtcattccgttaacagaatccgcgggacggatcattgcagagtttgtcatggtgtacccgccgggaattccgatctttattccgggtgagatcattactgaagaaaatatcagctacatttttaaaaacttggacgccggccttcctgtgcagggtcccgaagatgccacgcttgaaatgatcagagtcatcaaagagcaaaaagccatccaataaacataaagaagcccgaaacgaaatcgtttcgggccttttttacgctttttactcttcttcaagatgacactggcattgtccgcagcatgttccgtataacgtcgtgaccttctcatcctcaaagtaatgaatcgcttcgttacagtcttggcaaacaattgtacccatctgtcattccccatttctcagaatttgaaaacgcttaatttttacttgttgttattatattattatgtcacatttaatatgtcaactgataaattgtataacacatttattttttacggtctttttatagctcgagggttaatcacggtatatcctttatgacgcaatccttttacaatgtccggcatggcttcagccgtccatttccggtcatgcatcaatatgttggcgccgtcccgcaggtaaggactgctcagtgtgatatcggtaagcgcttttttggattgatatttctgatcccaatcatacccgaaggtccagttcattttcaccataccttctttttttataagtctgtcactgtagtccgtattgcttccgaaaggcgccctgaaaaatgcgggtttctctcctattaccttttcaaccgctttattgacgccaatgatttcttcccgttgtttttgttcggaaagatcttttaagttttgatgagtcattgtatgatttccgatcataaaacctaactcatgaatatgcttaagcgctttcttattttcatcttttttcaaaaaatgtccgtttacaaaaaagatcgctgacgcattgagatcatgcagtttgtccgcaatctcagcggcatgctgatcaggcgcgtcatcgatcgttaccaatgcgatcggttttttctctttctgttcatccattttttccacagaaaaggttttcggattgatatagtaacggggctccgccttctgttttttctcttttgtatgatggttttcccgtttggcatgattggccgcggcttgagaatggggtttgtttgtttgcatcttttcatttgattggcagccggcgagtaagcacatacatatgacggctgcaatggctttatacatgcaatccctcctgatatggttttgcccccagtataacgaaaaaacagcgctctcacgaaaaacaatgtgccttttttacacatcggctgtgcaagttgtcacacgtattatttcttcattaaaaacggtttcaattatataacaattcagtaacaagccttaggtttttcacctctcgtgatacacttaatatagtccttataaatggatgaaccaatatattatataaaacagaggagtaagatagatgcgctaccgtacggtgattcccttttttttgatgctgttcgttctgtcaagctgttcggtttctactgtcattccattcaaaaataaccggatcgacagcattcatcacactcaaatcttgtttttttccgatgaaaatcatatagataaagaagttccttattacgatgcgattcttgatttagaaaagaaatatccccatcatgtcgatcaaatgaaggtttatgacaacagaaagggatgggaagaggaaatcaacacgttccctgcgctgatggtgatcaatcatcggcatgtggtcatgaagattgagggatccgtaaagaaaaaagaggatatcatcaaacctatgcagcatgtgcttgcacaataaaaacagcccccgcttttacaaacgggggctgtttctttgttacatcattattttacgatgtggatcgggcttccgattgctacttcggcagcttccatagtgatttcgcccaatgtcgggtgagcgtgaattgtcattgcgatatcttcagcagtcattccgccttcgatcgccaggctcaattcagaaatcatgtcagaagcgcttgcgccggcaatttgcgcaccgattacaagaccgtcttctttacgggtgatcagcttcatgaagccgtcagtttcgttaagagacagcgcacgtccgtttgctgcaaacgggaacttagctgcaacgacttcaatgccttcttctttcgcctgtgcttcagtgtaaccgacagaagccagttcaggctcagagaatacaaccgccggaataccgaggtaatcgatttcagccggctctcctgaaatagcttccgcagcgattttaccttcgtaagacgctttgtgagccaaaggaggtccgtcaatgatgtcaccgattgcgtaaatgttcggtacgtttgtgcggcactgcttgtctgttttaatgacaccgcggtcagtcatttcgataccgacttgctcaaggccgagctcatcagtgttcggacggcgtccgacagtgattaatacgtaatcagcatcaaccgttttttcttcgccttttacttcgaatgtaactgttacgccgtcaggtctttcctcaacgcctttagccatggcgcttgtatggatttcaacgttgccttttttcttcagtctgcgggtaacgagagaactcatttgtttttcgaagccaggaagaatttcatctccgccttctaaaataaccaattcagttccgaagttcgcatacgctgttccaagctcagtaccgatatatccgccgccgataacaacgagctttttcggaatttctttaagcgccagtgcgcctgtagagttcagaacgcgttcgctatatttgaagtttggcaattcgataggacgagaaccggtagcaatgatcgcgtttttaaatgtgtatgtttgcgcagagttctcatccattacgcggacagagttgctgtctacgaaataagcttccccgtttacaacgtccactttatttccttttaaaagacctgcaacaccgccggtaagcttatttacaacagaagctttccattcttggacttttgtaaagtcaaccgttacgttctcagcagtgattcccatgtcatctgaatgttttgcattctcgtaacgatggcctgcattgatgagcgcttttgaaggaatacagccgacgttcagacaaacgcctccaagagttgctttttcaacgactgttactttttgtccaagctgagcagcgcggatggcagctacatagccgccgggtcccgcaccaatcacaagagtatctgtttcaatagggaaatctcctactaccataacattacgcctccattaaaataagttgtggatcgttcagtaaacgcttgatgtggtttaacgcattttgtgcagttgctccgtcaatcatacggtggtcaaagctgagagaaagagctaagacaggagcagctacaatttcaccgtcacggacgatcgctttttcagcaatacggccgataccgagaatcgcaacctctgggtggttgataaccggtgtgaaccattggcctccggcagaaccgatatttgtgatcgtgcaagaagcgcctttcatttccgcaggtgcaagcttgccttcacgcgcttttgtagcaaggctgttgatttcatcagagatttcgaaaacggctttacggtcggcatttttcactaccggcacaagcaggcctttttcggtatccgctgcaattccgatgttgaagtaatgtttttggatcacttcatctgttttatcatcaatcgatgtgtttaaaacagggaattttttcaaagcggatgttaatgctttgacgacgtaaggcagataagtcagcttgatgccttgatcagcagcaacttgtttgaactgtttacggtgagcaacaagatttgttacgtcaacttcatccataagagttacgtgcggtgcagtatgcttagagttcaccattgctttcgcaatcgctttacggataccgctcattttttcgcgtgtttcagggaattcgccttcaggagcctgagctgctgcaggtttagctgtttcctgaggtgcagctgtttcttgcggtcccgcttcttgagccgctcctccatttgcaaagctgtcgatatcttcttttacaacacgtccgttattgcctgaacctgttactttacggatatccacgcctttttcacgggcatatttgcgtacggaaggcatcgcgatcacgcgtttgttcggatcagcttccgcttggtcctgctgtcctgcgccggtttcttttgcaggctctttaggagtctcttctttagagatatcctgccctgcttcagcagacgactgaacttgagcctcagttttcgcctctcctgaatcatggcttcctttaaattgaagatcttcgtaaccaggtgcgtcaaacgtaataatcgtttgtccaacagttgcaactgttccctcttcaacttttaattctaatacttttcctttaacaggtgaaggaatttctaccactgctttatcattttgcacttcagccagaacatcgtcttcttctacctcgtcgttcggcttcacaaaccattttacgatttcgccttcgtggataccttccccgatatccggaagtttaaattcaaatgccacagttttcgacctcctagttgattaagcaaattttagttatgcatacgcaagcattgaacctagtaaacagactccttcatcataagagaaaaggactctctttaccgtcttttaagatgcctgattaaaattcaagaacttttttcgcagtttcaagaacgtctttatggtttggaagccatacgctctcagcaagcgagaaaggaaatactgtatcaggcgccgcaacacgcagaaccggagcttccaggctcagaatcgcgcggtcattgatttcagctacaacgttggcagcgatgccggcttgtttttgagcttcctgcacgacaattgcgcggcctgttttttcaacagaagcaataatcgtatcaatatcaagcggacttacagtgcgaaggtcgataacttcagcagaaacgccttctttttcaagctcttcagcagccttaagcgactcatgaaccatcgcgccgtatgtgatgatagaaaggtcagtaccttcgcgtttcacatcagctttgccaagctcgattgtgtattcctcttcaggaacttcctgacggaaagaacggtaaagtttcatatgctctaagaaaacaaccggatcattgtctctgatagaggcaatcagcagtccttttgcatcgtaaggagtggaagggataacaactttaatacccggctgctgagcgataaggccttccaaactgtcagcgtgaagttcaggtgtatgaacccctccgccgaatggagaacggattgtcaccggagaagtccagcgtccgccggaacggtagcggagacgagccatttgtcctgagattgaatccattacttcatatacaaatccgaagaactggatttccataacaggacggtaatcttgcaggcctaaaccgagagcgagaccgccgataccggattcagcaagcggcgtgtcaaatacgcggtcctcaccgaattctttttgaaggccttcagttgcacggaatacgcctccggcaacgcctacatcttccccgaaaagcagaacgttttcattgtttttcagttctgtgcgtaacgcatcagtgatcgcttgaatcattgtcatttgcgccatggcttacttcgactccttcgctttgtaaatttcaagttgttctttcaagttgaacgtcggctcttcaaacatattctcaatcagctctgttactttcggttttgattcgccgtcagcctttttgatagcttgtttgatttcttctttggcctgttcaatcactttgttctcttcttcttcagaccatagtcctttgttttccaagaacttgcggaaacgtacgagcgggtctttttgctcccattcattttctatttctttcgtacggtatttagtcggatcgtcaccggacattgtatgaggtccgtaacggaatgtaagagtttcaatcagagtcggaccttcaccgttaattgcgcgctggcgtgcttctgcggttgcagcgtaaacggctagtgcgtccattccgtctacttgaacacctgtaataccgacggcaactgctttttgggcaattgtctgtgcggatgattgcttttctacaggagttgaaatcgcatagcggttattctgaacaacgaagatcgccggcgctttaaatgctccggcaaagttcattccttcatagaagtcaccttgagaagctccgccgtcaccagtgtaagtaatagctaccgcttttttaccgcgctttttaagccctaaagctacacctgcggtttgaataatttgagcaccaataataatttgaggtgataaagcgtttactccctcaggcatctgattacctttaaaatggcctcttgagaacaggaatgcctgatgtaaaggaagcccgtgccaaatcagctgaggaacgtcacgataacccggaaggataaagtcgtcctgttcaagcgcgaagtgtgatgcaatttgagaagcttcctggcccgctgtcggtgcatagaaacctaaacgtccttgacgggaaagagaaattgaacgctggtctaaaatgcggatatacaccattcttctcattaattcctttaactgatcatctgaaagatcaggcattgcgtctttatttacgacttctccttcagcatttaaaatttggaacgtttcaaactgcttattaatagcatcaaattgttttttgctatcaacaattgaagtttttgtctttgcagccattttttaaaccacctcttcttttgatttaacagggttaggataccgtttagccatccgtattaaaaacagtcttatcatgctctgcaattctaaaattaatcattcagaaattcacatagcgcttaagcaaagataatgacgtttaaactgtactaataaaaaaagattttttattagtacaatatgatcaacaaccatagtttacagtaattaaacaaagccgtcaattatttataaccttattttgaaaccgcttataaaacttaagatcatactgcgccaaactgtactataaaagactttaaactgtattataaaaacgctctactgtactataattaaaaaaaattacaaagagtaaattaagttatttaacttcgagggcaggctttgagaaggtgccgcgggataaaaacgggcagttagcaatcgtcccgcctgccgaacaggcgggacgatgcttttgtctaattattcaatacccgcccacacgatattcagcggcgtcagtacggcatgaggatgaaactcggaaatcggagtgaaaaatacatacgtaaaatcttcggctggatcagaaaacatgccgcaccaacccattccaagatgtgagaacgtgccttctgtcatgaaataatggtcaccggccggccacaaattaatgcctaaaccaaagccgccctcctctcttggcgctccgaagaagtaaaaaggaagaccgggctttatttgatttctcagcatggcctcgactgtttttcttccaagcagcttcttatctttcaatctgcctttatttctaaacatttcagctaacttccaaatatcttccaatgaagagtacagaccgcttgtcgctttattcggaaaatacgggtgatgacttttttccagctgtacgcactcgtgctcattgatcacacaaacttcttcttttaaagcatcaggcacataaaaaaacgttctttctaatccgagcgcttcaataatatgctttgttacatactgttcgtaggacatgcctgttactttggaaataatgatgccaagtatgacaaagccggttctggaatagttccatgcttcatccactccgtactctaaaggcgtactgaccagatagcttatccattcttcctcattcgttaagtcaatgccttcagccttttgaatatccagctcaaaacttaatcccgccgtatgagtcaaaaggtgtaaaattttaatgtctccgaaacccggtttatcaaatgcaggcaaaatgagcttgaccggcattttcagatcgagcagacctttttcgacgagctgcatgacggctgcagcggtaaacacttttgtcaaagaaccgatttctctgattgtatcaagctgaaatgtttgcttttctttttgtccgccggtaaattcccctaacgactcagccgcaaaaacctcgcctcctcttgatatcatataactcgcgcattgcagatctccattgtctatcatcgtctgataatggctgttaagagcgttaatttgtttcatatcaaatgccggattgcttattgtttgtttcattgttttctccccctgtactgtatgtatcgttttcatcccttacttactgatttcttgatgaattctgacaccgctttattaaattcttccgggtgtgtgatgttcggaagatgccccgctcccttaattttctttaattctgcattgctcagcagtttcttcagcctttttgtttctttctgatcaactacgctttccttctctcccgtaaggataagcgttcttgtataaatgtcttttaaaaagccgatcgtagaatagccttcttgttgatgtatcttcataaaacgttcaatagaagcatttaagaattgattcctgtataaactttcatattcatgcgattttcctatagctataaaatcatttttcagtttttcctcaacactgctttcagggtcttcttcgtattcggtgtaacttccggaaagaatgagtgtttttactttttcagggtattcataggctatcctctgtcctatcatgcctccccaagaagctgccgcaatgtggatcggccaagcaacccctatctcgttcagcacttcaataaaagtctgagccagcccgctcagtgtaaaatcggcgctcccctcactcagcccgtaacccggtgtgtgtatgacaattacattaaattggtctgcccactccttcatttgttctttccacatgtaagcagtggtagcaaaaccgcaaatcagtaaaattgtttcacccttaccgctcatcaatatttccatatgccgggcattttctgtgttagccagaaaatgaacggtttccgtttcttctgtctggtaaaaagcgatgagtttttttgcggcatcgctttgatcgtgctgaagggctcctttcttcagtctgctccaataatgcaaataatcgtctagatgacgattggaagctgtgccgagtattcggaaaggactttcagcttcttcttccgtaacgattgacgaagcatcaaaatcggctgcaatcgctgaatctcttaccagaggcggtgctgaacgggcggataacggattgaaattattttgtattttttctttttctccgtataacacgatcagctggtggccttggccgagaagcgagtgttcaaaagctttgattccggcagtattttctaatgggtgaagtccgtactcggttttcataatgtcttgaatgccggcatcaactgacatgcctccgtctttccagaaaggccaatttacagcgatggtttttcctgatctccccccctcctttctcatacattccctccactcggcaaaatgctccagaaaacgattggcgtaggcgtaatcagcttgacccaaacttccgatttctgaagagatggaagaaaacaaaacaaaaaagtctaaaggcatatttctgagcgcttcatccaaatgaatcacaccattgacctttgattgcagcaccgcctgagcttccgcgtctgttttattcataatgaaagagtcttttaacacgcctgcactgtaaatgaccccgttgatttcggaataatcagcatgaattttttccgctaaattgatgacctgctgtttatctgacatgtcagcctggatgtaagaaatgtttgccccgtcatatcggatgctgtctaatttttcttccatttctgctgtcattttcgatcgtccggcaatgataacgctggctccgtgatttgcataaataaacgctgaaataatccagccgatgccgcttaaccctccgattatgagatacactccgttttttacaaactttgcggccttttgccctggttgcagcgaagcatctttgtatgctgtcacccgccttttttgatcgccgtcatatttcacagcctcatgatgtccggcacttaattcattgagaagcaaagatgctttttcaatggtttgtcttgaagaaatctcaaccgttttacactttatattcggctgctccgcattaagcgttttaaaaaagcctccaatcgcggcgtaaatcggatttgtatattgatccttgtcatgtacgtacaaaaggttgatgttatcttttattttttgacggatcaacgctttacttaaataaaggattgaataaaagctgtgagtcaaatctaacgctgcctcagtataagcttgttttgacaggtaatgaatgattgacgccggaaacgctccggactttttcatatcatctaacagtctggtgtaatgagcagactgctccggattaaatttataatgcttttcatttaccatttcatattcagcggcggcttccgcataaataacattttcactgccgatgtactttcggatttcatcactcaatgaactgccgaaatcgaaaatcaatgtattttccttaggcacttctccggactttaatggcgattctatccattctttttgtaaatataaagattcaagcatcggcttttcagacggctctttcgtttgcgttttttctttaaaagctgcggccggcgtattacgcacatcatatttttcttctaaataagctgctaaatcatgaatattgttataatcaaaaagcaatgtcggatacaattgtgtatccaatctttcctcgagcattttcgatatatgcagcagctgttttgagtcaagacccagttcgtaaaaagattggtgtttgtccgctttatttggcggcgtgtttgtcacatctccaataatggatgacagctcatctgttaatgttttttgactgtcttggtgctgaactgtatcagagatagagtctgtaacgcgagctccgtatttctcctgcagatattccgtcaattcaccgattgtggagtaatcaaataataaagtcgggtacagctttgaacctaacaacagttctaattttttagataagtctaataactgtttagaatccaagcccatctcgtaaaaggaaatatcattcttcaccgtttcagcaggcttttcaatcatgccggctatctcttggattaaattatttctgatcatttctttattgttcgttacgctgccgacgtctttagctttttgggaatgctccagcctttgtattgatttttcatttctgactcttttcacaccgaatcgctcataataaaaagcaagctctccatcaggcctgtatacttctatgtccgcatataaaatgtctttagaaggcggctgcgttatactgtttttatcaatatacacaaaacaagacccggttgttttatgcagtgcccggaatgtctcaatatatatagggataaacgcatttgttccttcatccggcaagtctgatgtaaggactcccaacaggctgagagatccatccaaaaatgcggggtgcatgtaaaagtcatctgtatattcttttgaaagtccgcttaaactgacctctcccagaatataattttcaccttcatataccgtaccttccaatttcataaaatctttatgaatcaggccgcccctgcgcaaattacgataggcggcttcagcattcgaagtccggacggcccctttctttaatgcttcgattgaaattgtcttttcgtctatcgcattttttcttatgatttccgcctgcaagttgactgacgcttcaccttccgccttttcagcgacccatttcctgcttgttgtttcaacaagccagccgttttcttgttccgtaaactggaaggtgacttttttatcaaaatggactgacgtcgcaacaggttcacggaataaaacatgtttgatttcaaaacttcggggtgatatccctttctcagctaaaaatcgtgttattaaatccagatacgttacgccgggtatcgtacgcacttgatgaaggacatggtctgaaacaatataatcgtcatgtttgactaatacgctgaacctcatgcaactcgacaacctttcttcttttacaaagtaaagaaacagagcaggtgctactctgtttcatcaataatttcaagaagccgttttttattctgtttgatttgtttttttcgatttgaatccggccagtactcttttctgacaaactcggcaggcggcagcggagttctgacggaatgatatgaatcatccaggccgcttaccaaaaggtgggcgtttgttccgccgaaaccgaaagcgctgatgcccgccctccgttttccatccttccagcttctcagttctgtattcggataaaaaggcgacttttcaaattcaaagcggggatttggcgtttcacaattcaatgtaggcggaatttccttatgccatattgataaaatcactttaatgaaacttgccgctccggcggcgcttaataagtgtccgatattggtttttacacttcctactccgcaaaattgcgttttgtttgtgtctcttcggaatacttttgtcagagcctgaagctcaatcggatctccaatcatcgtgcctgtgccgtgagtttcgacgtagctgactgatccgggagtgatatcggctctttcaaatgcatcttgaataacctgctcttgaagcttaggattcggagtcgtaatccccattgtcgcaccgtcgttattaatagctgatgcttcaatgataccgtatatccgatttccgtcagcttttgctttctccagcggttttaaaagaacagcgccaaaaccctctccgggtacaaagccgtttgccctttcatcaaaagtaaaacactgaccgtccggcgaaagagctcctccttctgttaacatcaggtaaggaatttcatccaaaagcagatccgcccctcctgccagcgccatttctgaatcaccgttttttatgctttggcaggctaaatgaatgctgactaatgaagaagaacaagcggtatcagacaccatgcttggaccgtgaaaattaaagaaatgcgacacatgtgaagcaataaagttttgactaagcccgacgatgtggctgctgctttctttcggcagtttgtgaccgtagccgcccattctggaaccgacaaatacgccgactttttttcccgataattctgtttcttcataaccggcatcacgtacagtctgtacactcgtttctaagaaatgtcttatcagcggatccgtttggatggctttctcctcttccatacggaaatactccggatcgaagctgccgattccattaataaatcctccccatttgctgatgctttttcccttttgctgcaccggagagtaatgttcttctatattccaccgggaatcaggtacttctttaatatgattcttcccttttctcagattgtcccaaaattcctctttatcagccgcgcccggaaacttacatccgattccgataacagctatctttgcagtggaagccgtctgcggttctgtatttcggctcgtcacagactgcatatcatgctgattgctgctttgagaatcagtctgttcgatttgttttttcaacggcggcgccgtcttaccgatatattccgcgagaccatgaatcgtgttgtgttcaagaagcacagtagggtcgatttttttctgaatcattgcttctatacgatgtataatgctgacaagaagtatagaatccacaccgtattcctgaaaatccgtatttgggttaagcttttcaaggggtatgctcaattcctcggcaaatacggcagaaagttcactgacaagcccttctgaatgatcaaaagtgccgggagtctcctgtcttcgggccggaaatgaagtcttgccggttttattgatgttcaggagactgtctgcatgaaacactgttccttttttcacgataggaatgatattggccgattttttctccagtgcatgatacaaaatcgccagtccttcccgcgtggatagagagtccaatcccaattcatcatataaaggactcgtcacagtacccattccgacttctttccagctcggccaattgatggacgtgaaatacgttctccccttttgaaaatgataagccgcgaaatagtccatatatgcatttgcagacgcgtaatcagtcattcctttcgacagtttgggtgactgtgctgcaattgatgaaaacagaataaagaaatccagcggcctattattaaaaatccgctccaaattctgaagtccagtgactttcggcccgtacaccgtcttaaattcactcattcttttatgaataaaggccggatttccgccgctgtgcagtccggcacagtgtatgacaccgctaatatctttaaattcaaggcttacttggtgaaagaatgaacgaagcttctcttcatttgtgagagaaccgctgtaatacagatagtcgacacctttttcttcaaaactttgaaacagttttatattgctgactgtcttttcgtcctgtctgccctctttcagcaaatgatcccattcacttcgcaaaggtaatggacgcgtacccgtcagcacgagttttttcactccccgtttcaccaaatcttcagctattgctctgccaatgccccctgtcccgccggtaatgacgatggctttatccgcaggaaatgaaacaggaccgccgccggtatcgattctttcttcttcaaaatacggaacatatctgacgccgctgcggtagcatacttcattctctcctgtacattgcgccctttcaatctcaaagatttgtttcagcttatgcgtttctttcatgctgtctatatctattgttttcacatgaacaaagccgtattccgcagaaagggctttcagaaaagcagctgattctgcacccgtcagctttggtttttccgctttaaatacctgcaagccattggttagttgtaaaatggataatggtgtttccttttttctccgcttaattatttcttgtataaataagaatttaccatatgggatgccgttctgattttcactctggtttccgatatctgagaaatcaaatatattttcgacctgccgctcaccgcccgagaagatctcacagataacgtcgtatgcgtggttttcatctaataaagaacactcaaacatttgatcagagtgttttatatatgaagagtgatgttttatgacaatcagattctcctgatctatatccggacaaatggtgcgggcaattgattctgtgtcttgattcacaaatgcgactgtcagtccgtactcttttgtttcggatggatttacaaacggattctccctccattttttttgcaagtgatgttgagaagaatgctgagggatctctgtcctctcagtcctggacggaacccaataacgttcttttgcaaacggataagtcggaattgagatccgtttacccggctgctgtaaatgttgatgaacggatttccagtcgatatccgccccccaaacccataattgagccagcttttccgcttcaccgttctcaataatggtctttacaaacaattcgcctgctctgccttccgttaacgccttcattttttcagcaaatgcatctgattgctgattaacatatacgcctggaacttgcttgtcaccgcggcaaaactgagataatttatctttcatttctttaagagaggtaccggtaatcgccgctctggcctccatcgcttctctgcccgattgtgtagtgtatgccagatcccgtaaaacgacgctttccgattggccgccttccatcacttcattcgggaacatgtctcttatcgctccggcatattccttcagtaagtattcagtaaccgcttgaatggaggggcaatccgttaattcatacatcgtgagttcaatatgaaacatttcgttaataaaatccgccatccggcttaattccaaaggccctacgccaaattcactcaggtgatcagaaatattaatttcttccggatggatatgaagcaattccgaaacaaacggtttgagtacttcattcaccttttctttcatatcagtctgtttatcctttacttcaggacttagtgaacgctgaataaaatctttcatgttttcggcatactcaagaagacgttcattgtctttggcagataacaggacaatatgcggttcgttctcaacatgttctgttgagacgtttgtttcttcatattcttctataatgatatgaacattcgttcctcccgctccgaatgagctgattcccgctcttctcggaacagttactgtttttccgttttcctgcagtttcggtttcttccagtcttgcaatgaccgctgtacataaaagggagatgctttaaaatcaatatttggattcaacgtctccgcatgtatggaaggaaacagttttttcagtttcatttgcaaaagaacctttgtcaaaccggcaattcccgctgcggcctcaagatgaccgatatttgatttgacagaaccgattgaacaatattgagtgtgctccgtaaattcccgaaacgcttttgttaatccggtgatctcaatcgggtctcccagagcagttcccgttccgtgagcttcaatataactaattgtacgagggtcaatacaagctttctgaagcgcgtcctgtatcagttcagactgaccatttggattaggaaccgtaaaaccgtttgttctccctccgtgattgaccgctgtcgctttaatcagcgcataaatatgatctccgtcccttaccgcttccgccgccggctttaaaagtacggagcccactccttctcccggtacataaccgtcaccgccctcgccgaatgtacggcatcggccatcacttgcaaagaagcggctttgatttaataatgtatatttattcggatgaagtgtaagattgactccgcccgcaacagcaagtgtgctttctcctcttcgtatactttcacaggctaagtgaatggcgttaagagaggatgaacacattgtatccaccgccatactcggccccttaaaattaaagaaatacgatattctgtttgctattgcagaaaatggagacccgacggccagttcatttcctttaagtgattcttcaacgccgaaaaattgatagcttccatatgtgacgcctgcaaatactccgacctttttgcgggtcagatctgaaggtttataacccgcatcctctatggtattgtacactgtctctaaaaagagacgttcctgaggatcaagaaaagcagcttctttcggtgatatccggaaaaataaaggatcaaaccggtctggatttttcagaaaacctccccacttatagcagcttccctcgagcatttccttccggtcatcaggaatttcgcttacgcaatcccgtccattcatcagcacattctggaactctctgatgttttccgcacccggatatctgccgctgacaccgataatggctatatcagcagaaaggggatcggccgcaatgtgctcttttgaaccttctccttcagagcgtgccggcgcttttgtttccactggttttcttttttgctttttttgatatgaaacaagttcagatttgccggccgggttcagcagtttcatcattcgttcgctgtgatgactcaggaaatattcggctaactgcgatatggaatgatattcaaaaaataatgttttcgacaatctgccgatactttgctccagctttttggtcaggcgcatgatcatcactgaatcaatgccgtatttctccaggtattgtttttcatctatgagtgagaccggtaatttcaattcctctgacattatattttttagataactgatgatattttgtcttaattcatcgctttgtaaatcggcatcttcctgccggtctgaatgtaagctgattgtgccggcacgcttcagcacatcctcaatcttttcttttcggcctttcagggcgatcagctgttcagatgattgacacaagctgttctccagagcctgtattccgtcaccgtcatctagcgggtcaaggccgagttcctgtttcatgtaggatattccttcatcgtcaatattcatcccgccggaagtccatagcggccaattgactgacaccaccctttcggcagactcttttgcggtcataactgctgcatactgatccaaaaaggcattggcgaaagcatagtcacattggccggctgatccgaagactgccgatgtggatgaaaacaagacaagtaattcaactttcatttttttgatttcttccgccagccagagcgcgccataaactttcgaacttgtgacttgatcgatttcttcttttgtctttcttaagataaaagagtcacggagtacgccggcactgtgaaatactccatgtaaggtgccgaactgctcttttgcaaaagcaaacatccgttcagcatcactttgttttgaaacatcagatcggatatattcaactgttgaacctgaacttcttaaatattcgatcttttttttctgctcttcagttaaatcagagcgccctgtcaatatgagattcgctttccatttttccgacagatgttttgccagtatataaccgagaccgcccaggcctcctgtaatcagataattttcatgatgtttcagcggctgggttaaatcgaataagccggctttattatagcttttcgtaaaacgtctgccgttttcatagcgcacttcaaaatggatatcccgtttttcgtcacactctctctgatatatatcagctattgctggaagagcggctcccgcaccctctgattgagtgatattgataatctgatagtgaaaattggggtgttcctggtgaacggttttcaccaatccgccgagagcatgatgcagcggcagttgttctttattctgagtttgaaaaatatgcgtcagttttattatctttttccattttaattcaatcagcgcctgtgtaatatacagaagagaaaacaatccgttttccaattgtttctgtatacctcccttactcatgtcagcctgagaatcagaccacaagtgaagaatcttttcgggcggctgataatgatcatgaatgtatcggaacagctttagataatcgtcttttttcacgtggttcatacaaatcgtatcatcatgtaaaacagcaaattcttctccgcggatgacaaacaagagagtgcagtccttaaacaaaccgctcaattcttgtatttgccgttcattttctgcaaaaatcaggagcaatcccgtcaagggtacgctcttcgtactcggaatgaacgattctgtccattccggcttgtaatataaaagaggatggttcgatgcccgtgatttttgattctgaatggatgttacacgggcatagccttcgtcagccgacatttgtcctgtttgaatcagatcaagaatatcgctgatttgttcacgttttccgttcatcattcttcccccattaattgtttcaatacagccttctgatcaatatcattggtttccaattgacgcaggagacgaatgagttcatcgtccgtctgaacagtgtctttttcatgaccatatctgaatctcacatctctgcactccgccagaatgcttccgtttccatctgtaaatgtcatatgacacgttacatcacggctgttctgccggttcactttttgagtataaacataaaaattttgagcgagaggctgatagacatccgccgctcccattccgatcaattccgggaaggtttctccgctgacaaaaaatgcactggcttgaatcgcggactcaagcgcttcaggagaaatcgtaaaattttctctttttgcataaagctcatccggcattgaatgaagcgacagcattccgtaactgtttttcgctgattcaatgacaaaaggcgcttcagccggatgttcagtcatttctgatttgacttcagcaatatcaagcgcttcaggaagcataccgctttcaggcttaaccatatgcgcatttccgctggcaagacgtactttattctcattttttgtgtttgcatatatgtcaaaccgcgcaaagtcacgctcaggcgtcagcgtaatcatcagttcccgtatatctgtcattccgttcatgctttcggtccacaataaatcggtcaatgtttgaactggttgtccaaatgccgccgctgcattgacgatagccatttcagccaaagatgcataagggaaaaaggacacgtttccttcagacagacttagtgcgaacggatgattacggctgatttttttcgtgaaactgaactgatgaaaatcggacgtgttactccccaagaaagggtggcccgtcttactcacatccgctgaaacaagtgcttcccctttttccgctatccaataccgctgtttgatcagcggttgtcccgggatagaaatcctgcgggcattccgattcacctcaaaagtctcccaatctatctttcttccatttacccatttggatgctgcttcggcgtaatctgaacaaacgtgaggcatttcattgtgaacttctgattcgaatgtattaccggtatggctcaggctgcttttttcacccctgatataagctgaaagctcttcagcaatgacctgcccggaatctgccactatcgccagccgttcttccatatgatcgcgtcccgtctgaagtgtataggcaatatcctgaagacgcagtttatgattgttatccttcgattcattttctgatagaaaatcagccataacctttgcatattttatcagccgttgtttgtcttgagccgataaaacaaagatcactcggccgctttgatgatcaaatgcttttggcggttcatacgcttccaatataagatgcgcgtttgttcctcctgccccaaaagcgcttaccccggctctcaaaggatgaacagcatggctgttttgcggaatattccattcagccgctttccgctgcacttgaaaaggaacctgatcaaaatctataaacggattaacaatatcggaatgcagagaaggaacaagctgcttattcttcatttggagaagcactttcgttaccgcagcgattcctgccgcagattctaaatgtccgatattggatttcaccgaaccgatggcgcaaggatggttcaattgataggaatctttcagtccttgaatttcaatcggatcgcctaatgatgtccctgttccatgcgcttcaatataattgacggtgttcggatcaatgtcagctttacgaagcgcttctgaaatgacctccgcctgcgcatccggattcggtatggaatacccgctcgtctttcctccatggttaacggcgcttcccttaatcacgccgtatatttgatcttgatcttctattgcttttttcaatggttttaacaatacggctccgactccctcaccgggaacgtaaccgcttccgtcttttccaaaactccggcatctgccgtcacttgatagaaactgtcccatgctgaggaacttatatttattcggatgtattgacaaattcactccgccggctaatgccatatcgctctctccgcaatgtatgctttggcatgcgtaatgaatagaggtcaatgatgaagagcacattgtatccagagccaaactcggaccttttaaatgaaaataataagacacccgattggcaattgaagaatagacggaagccggcgaaaaagccgctccattttcttctccttcaaatagttgatattggccccacattgcaccgacaaatacaccgactttcatcttttccagcatgtttctcgggtaccctgagtcttcaaaacaatttttggccgtttctaaaaagagtctttcctggggatccataagttctgcttcccttggggaaatatgaaagaaaagcggatcaaattgatcggctccgctgataaaacctccccacttgctgtaagacttccctttcatatctctgtcttcgctgaagaaatcatctatattccagcggtcaggcgggatttctgtaatacaatcttttccgctctttaaattctcccaaaattcaggtaagtcttcagccatcggatactttccgcttaaaccgataatggcaatgtcttgatgccttgtatcagctgtttcatttatttggatctcacggctttcatcctccttgaaggtatcttgaagtgcagattccaatttttctttgtcaccttcaaacacgatcagctgtgatgcgttcatagagagtgaatcttgaaaagctttgatcccattggttttactaaggggaaccataccgattttttgtttcatccatttttcagtttgtttatccactttcatgccgccgtcttcccataggggccagccgatggctactgagacgccggagcgttcttttttccgcctcattccttcacgccactcagcaaaaagatcgatgaaccggttagccaatgcataatccgtctgtccgatattcccgtacatcgagctgcttgatgaaaacatcacaaagaagtccaaaggttcggtttgcagcaagctgtccaataagaccgtcccatttattttcggagcgatcacttcctgaatttcatcttttgatttttgaatcaataaagcgtcgtgcgtcacaccggcactgtgtatcacaccgttgatttctccgaatttccttttaatagtttttatgattcgctctgcatcgcggctatctgaaaaatctcctcttatatattgaacggaagaaccgcctgctttcattcggctgattttgttctttttgtcttccgtcagttcagaacggcccgctaaaataatattggctttcgtttgcgctgcgatatgttctgcaaatataaggcctaagccgccggcccctcctgtaatcatgtatactccgttttctttaaaggagaaatctgagttttgagccggttctgcttcccgtaaggcacggacccagcgcacatttccttcataataaagatcggtttctcccggatgcgcttcagttgattcgcatctgatgatttcagctgtaagagccggcaacgatgtcttgtctgaaactgatatcccgattgtcttaagggccagtttcgggttctcaagcaaaatagactgccctgcgccatggactgaagcgtaaagcggctgatcatttttatggtccgccggataaaggaaaagcgatacaacctttttttccgccttgctgcgcatcaatgcccggctgaaaaagaatagcgggtaagcccctttagaaagctgttcacttattttttccgggccggcaaatgatccttccggccacccgtacaccacggtgtcgggcatttgccccctttttttcagatcagctgcaagcctgtcaaagtgggcttcctccctgtgatctatctcataaattccgtctccgtgataggagaaacgattccctgataaaacgagaatgatctgtgtattttcgaatccattttcagcattttcccgcataaaatgaaaaagctctctgtcatattgaaacagcagacatgttcttttctttttatttccgcaatgcgggtcccaagcggcagccttttgtctccaatacggcgttaaataggtcagagccgtatgattctctccatgatgtagagggaggtctttgtcaacggaagtcttttcgccgctctccgcaaaataatttgcaagtttttgaatcgtcggatactcaaacaataaagtagggtacagttccctgcctgttttctcctccaatgcctttacggcttgcataagtgtgacggaatccaggccttgttcataaaaaccttttaccacagagagtgtttcaggggcagtccctttgatgtctgcgatcagctgctgaatgtctccttctgttataagagcggaaagattttcgttcttactttctttcatgtcaggcttttcagccggttgattttgcgttaagaaataactggacattttttgattttctttaatatacgcggcgagttcccggatcgttttctgctcaaacaggagtgtaggatacagctgttcccctgttttgttttcaagttctttgacaatggcaagcaaagaagcggaatccaggccttgttcataaaaaccaatgtctgtccttatgtcacgcagatctatatttgaaaccccggatattaattctttaaggtgtgtctcaatgctttcgcttcgatctatgattgaatcttttctcatcaggccgtcttttggctgagaagccgcttcagtttctaaacgagtctgcttcagattttcaattaaatcttttgagcgaatatgtttcacagacagccgtgtaaaataagcgatcatctccccgtgtgcatcgtacaaaccgtaactgacttggatgacatcccctgaatcatgattttggtcttgcttctctatgtacacataacacctgtcttccaggcgcttcgtcatacggaaagattcaatatgaatgggaatatacgttttcatccggcttgccggagatccttgtgtaaaatattcgggacatgcctgataaaggatcgatatgatggtagacgcatcaagaaaagtgggatgcaattgaaaatagccggtatattgtttggcaatttggctgagcgacaactctgcaagtacagaatgatcagacgcataaaccttccccagactcttcataaattcaaaatgctctatatcaaccttttttaaatagtcatagcatatctccatatcggcttcacggacggaggcatgtttgatttcatcgatatgaattgaactcatgctttccgggaatttctgcatgagcctgcagttcatattctcatcccagctttcatccagaatccggtcatcttttacctttctgctcttcgcctggatttcccatccctgttccaatccctgaaaacggatgcggatttctctgtcaaaggtgtccgatgttgctacaggttccaaatacaaaatattctgacactcgagttcttcaataggcaaacctttactcagcgccatacggtatatcatatctaaaaatgtgacaccgggtataatccgggtgccatgcacccggtgatccctgacaatatagtccgtatgtttaattgttaatgtgaactgatagttttgattactggccacctgtctcattccttttcttttctttataattctttgaaatcaagtaaaggaatcagcaattctgactcttccttttctggagcttctccattgtcgatccagcattgttccttattgaatataaccggagaaagcgggtgtctttttgtctctccatatcctaacgtgagatggctgtcgctcaatatcatatgtgcgttcgtgcccccgaatccaaaagaactgattccggctctcaaaatcccttttctgggacgccattcttttaaagacgtgttcggaaagaaaggcgactgatcaaatttaaaacgcggatttggcgttttacaatgtagtgtcggcgggagcatctgattttttatggataaggcaacctttataatactcgctatccccgctgcgctcattaaatgtccgaaattcgtttttacgctgcctactccgcaaaattgcgtttcttccgtaacctcccggaacacttcagtcagcgcttttaattcaatcggatctcctatcatcgtaccggtgccatgcgtttcgacataactgagagtatctgcatctattccgccttttttcagggctttttttatcactgcgctttgcgctttcggattaggtgttgtcatccccattgtctgtccgtcattattaaccgcggaggagtcaattaccgcgtaaattctgtcaccttcggcaagggcgtcatcaagtcttttcaaaaggactgcgccgcatccttctcccggtacaaatccatctgccttctcatcaaatgtatgacattttccttcaggtgaaagcgcccgagcctcactcagcatgacgtaaggcttttgatccagcaaaatgtcaaccccgcccgcaattgccatatctgactcttttgacatcaggctttgacaagcgagatggacgctgaccaatgaagaagaacaagccgtgtctacaaccagattcggtcctttcagattaaaaaagtgtgagatatgcgcgcctatgaaattttgtcctatacccacgatcgtattttttgaaggggaacctattttggacataaacgtcccggtgcgcgaaccgatgaaaacgccgacttctttgtttgatacttcttcctttgtatagccgccgtctctcaatgtctggacgctgacctcaaggcattttttgattaacggatcaagctctgatgcctcacttttgttcatattaaaaaacgcgggatcgaaagactcaatatcttgaagaaatccgccccacttactgatactttttcctttttcataggtgtcagagtagtatgaagaaatatcccatcgcgacgccgggacttcacggacactatgttgtcctttcttcaaatttctccagaatgtttctgtgtccggagcatccggaaactcacagcccattccgataatagcgatttgattcagactggttggttgcatttgagatccgctgtcccgtacttcggaagcattttgatttatatgttgctctttattccgaacctcaatattttctgaatcaatttgaggactgatcccctcacttgcaaataactcgttcaaatagacgcccagttgtgaaaaactcggatactccagaaaagccgaaggttcaatttttatttgaaatgcatcttccgcttttttgacaagctgaaccagtaagattgaatcaactccgtaatccgcaaaagacgtatcctgatctaaattcccgtaaggtattttcagctccgcggaaaaaatctccattaacttcctgatcatagcttcattgtcaccatgaccagagatcactttttcctcagcatccgggttatttttagccgcttgaattcttgtctgaagcagctgcttcagcttgaatttctccggatgtgtctttgccggtataaggcatggatatccgtttatcgtcatgatttcatccagcatggaaatacctgtttctgttgagtgtgaaagtaaaccgagtgcctgatatgatggacttgtcacctcgcccatcccaatgtccttccagctcggccagttaattgattgataatatgttttgccggctgcatgctgatacgccgcaaagtaatccataaaagcgttagccgcggcatagtcacttgttccggcgcctaataaaggaaaagcgctcgcaacagatgaaaacaaaatgaagaaatcaagttcgtcatcaataaaaacgtcatgaagtacttgcatcccctgcacctttggctcaaatacttctcttatttcttgatcagatttatgaataaaagccggattcgaatgattggctgcaccagcgcaatgaatcaccccgccgattttgccgaacttcattcgcacctctgaaaagaagcgatgtaatttttctttttccgtgagcggcccggaatacacttccacctgaactcccttttgatccaactcatgcagcagttgtaatttcgaataaagaggtgacttttcatcggtgtcttctaacatgccggctattttatcagattccggaaggtcggttactcccatcagcacaagttttttgactcccttgccggcataatgtctggcaagttctgctccgatccctcttgttccccctgtaataaccaaggtttgatccgtacggcataccggcagaccggataggttccggtttatttccgccgcatttaatttctcgacgtatggaatataacgatcaccgttccggtagcagatttcactatacagcccgtcagcgcaagcttcatctgtgattacctgtctcagttccgccgcagtcccgacatgcccgtctacatctattgtttttgattttatcttttgatactccgcgctcagcattttatatagtccggctgtttcggctccggctaacgacggcttgtcattcagaagtgtctgcagccctcttgtcacatgtaaaacgaaaagctttttacgtgtctttatgatttcctgcagcagtgtcagcttcccgattgtgccggtgcgtgccccgttttgattactccgcaaatctgacaggtcaatcatgccgatgatttccggattttcttctatgactgctagagccgtttttttggcttccccatccgaatgatcccagttatctgcgcaaatgacagcgggttcaatcagaggatctgaatcaaacaattcgaatgcaagccgctcactttcactattagccaggatcatcacctgtcctttcgtaaaagcggaaggcgcagccttttgttttttccacgatttttttaatacatcaaatgataagtcagtcggtgcatggggcagactctgcggtacacctgttttctgtttctgtgctgcttttgcggcaggcacccaatatctgttccgttcaaaagggtatgcaggaagagaaataagcttcggtaattccgcagtgtacatctcttcccattcaacgtctcctccgttcacccagtgaatggccatatctcttgcattttcaaagtgagcggctgacagggcattcttttgaccggcgcctcggcgggcgtttcccctatataaaccgtttaacttatgatctgaccgcaaatacatcgtcagcttatcgcgaagatcgtcaaggctgctaacctcaacagcgagccgctcttccatagcgtttctcccggtctgcgaagtgtacgcggcatcagctagtgacgtttttggctccagttcttttatatatgcatcaatcaagagtctgagccgttcttcatttttggcagaaagcagaataatttgcgtcttgttgctctgtaccgtttccatcttttcttcattcttgtactcttcgatgataatgtgggcattagatcctccagcgccgaaagaactgatacccgaccttctggcttgattttgcggcgtctcccaatcggtcaattcagactgcacgtaaaacggtgtttcctcaaaatcaatattaggatttaagttatcggaatgaagggaaggagcaagctgtttatacttcatttgcatcagcacttttgtgatagaagcaattcccgccgcggcctctaggtgtccgatatttgacttaaccgaaccaattgcacaacgataatcgcttttcgagctgtgcaaagctttggttaaacctgaaatttcaatcgggtctcccaaagatgtccctgtgccatgcgcttcaatataacttatgctgtctgcatcaatccccgccttatcaagagtttcactgatgacgtttgcctgctcgcccggatttggcacagtgtatccatttgtttttccgccgtgatttacagatgttcccttaatcacaccgtaaatcctgtccccgtcagcctttgcggcagaaagcgatttcaaaagaacggccccgactccttctcccggcacatatccgtctcctcccgctccaaagcttctgcagcgcccatcgcttgaaacaaaatgattttgtgaaagtaaagtatatttatccgggtgtaaggataaattcactcctccggctatggcgagggtggattctcccctttttaaactttcacatgcaaaatgaacagcagaaagtgaagaagaacacattgtatcaattgcaaggctgggtccgtgcaggtcaaagaaatatgacacccggtttgcgatagacgaataagaagacaagagcgcctgacgtccctcatcatctgaagcaccggctgcaaataactgatagtggctgtaggtgacgccgacaaatacccctgtcttatgccgtttcaactttttctttgtgtaacccgcatcttcaaacgtgtgccatgctgtctctaaaaataaccgttcctgaggatcaattaactcggcatcacgaggcgaaattgagaagaacagcggatcgaatttatcagcgtcttttataaaacctccccatttgctatcatgacgggcattgtcacctgtgtgataatatttccgaaaatcccagcgctctttcggtatttccgttatacaatcttttccggaagaaatattttcccaaaactgttccacatccttcgccatcgggtagcggccggctataccgataattgcaatatcttcctcggaaggtgcggatggtatgcgggaaacggaaagcttctcccgtttcgccggcgccgaatgatcaattcgctgttcggctgccggtaaaaacgccttcttcaactcatgttgatagtgttcaagaaaatactctgacagctcttcaacactgctgtattcaaagaaaagagtcttagacactcttccaaaatacttttcgagacgggagttaagacctaaaattgttagagaatcaattccgtaacggtcaaatgtatcctcgggtaaaatgctgtccgccggtcttcccgtttccgcaccgacgatctctgtcaatagacggatcgtttgctttttcagatctttttcatttaattgcggcagactgttgttttcaggcacagtctctatctttttatggtcagttgagagtaattcacttattctatctttgtctccgctgataacagccagctgagaagcagaacggctcatactgtcctgaaaagcggcaagccctgcttgggcagataaaagttccagccccgtgtgtcttaaagcctgcagctctgccggaccaactgtcatattccccgcatcccataaaggccaattaatagaaagtgttttcccgggacgtcccttaatgcttcgatactgggtgaatccgtccatacatccgttagcgaaggcgtagtcgctctgacccgcattaggcagaacggccgaaagggatgaaaacataacgaagaaatcaagaggctcttcttcagctgctttatccagccaaacggttccgaatactttaggcgctataacttcttctatgctttctttcgctttttttatgataaatgcatccttaacaagtccggcactgtgcaaaattccgtttaattctccgaatgtctgcttaatgtgcttaattaacgcgtccgcctctttttcctttgaaatatctgccgggacatataaggcttcagcaccgagattttcaagcgcgctcaatttttgcgccgtttcacgggatgccggagaacgcccggttaataccagcttgacttccgcctgtttcgccagatattccgcaaacagatacccgaggcctccggctcctcccgtaattaaatacacaccgttcttttttacactgaaactatgtttctccccatcttctttttttactcttttaagctgccttttataataatgcctcggctcataacaggtaaagtggtccgtcttgcattgattgttccattcaaaagagatgacatctgcaatatgctgctttgtaaacggctcgtcaaacattgatttcagctctgcagccttacatgtgaaattcggattttcggcctgtacggtcttaagaaaactttcaaccgcgttataaatgggctgaacctcgccctcggcattttcatacagaaacaaaacttctgctttcggacaaagtttgttcgccatgaaggcctgaaacatttgaaacaaggaaaacagacttttattgagctgctttcttattgcatcttctgtatttttgaagagcccggcagctaaaaaatgaataatatggcggggtcttatattttgagaacgcagaaccccgcatagcgcatcataatcctcatcatttgcaaagttcattttaaaacgaccgttccggcaatcttcgaaacgctcgccggaagtcacgtaaatgaaaggcgcctcatagccttcaagctgtctcttcattacggtatacatgctgtcgtctttgcaaaaaaataaaattggctctttcgtattcgggaatttttcactgcctttaaattcatgtctatcccataccatttcatatagatgggttttccccaaactcttaattaattccagcccttcttcacgcgtcaggctgccttctttcacctttttcacgatttgctcaatttgcatcgttttttcattcatggaaaagcaactcctctatcagctctgacgtctctttcgtattcatctcacctgtttgtgctttttcaagaagcgacatgatttctccatctgctgtatctttatttgaattgtgaagctcagtgttcgagaaagcctcaatcttctgcgcttcatctttatttaaatgaatccaatgtctgttcttactgaaaggataaagaggaagaggccgtttaaccggtttgagttcctcctcatacaagtcttcccagctgatttcacaaccgatcgtccacaactgagccagtttggccggcttgttttgctgaatcagtgattgaacatatgcatgaccttcggggccgccgaataaaggagcgtacagactatcaaaatccgttacatttccttcataaacaccttgcagtctgctcccctgaatgtaaccgtttaatttttcaagaagatctccggtattcgagcaagtgatcgcaaggcggcattcaaatggttcccttccggtttgcagcgtatatgctatttcttcaagaccgattccggacttttctctaaaattgccgttatacggtttatcagctgatcgattccagacgctgctgatatagcggcacagctcactcagggtcattaattcctgaaatatatctagtgatatttctgtgccgtacatttggtttatataagagattaattcggaataagccaacggatcaaatccgaattccgaaagaggtgtctttgcatctatatttgcggtatctaaacgcaggatacccgctgccgcttcccgaaccgcctcttgcacatcacgttcctgcacctcttgctgactgaattgaactgatagttcttcatgtaaaaacgctgttaactctttggctttaaccatcagcctttcctttgttttggccgatagaacaatgatttgatcccgctcggcagttactgctttatcttgtccgtattcaaattcttccacgatgacatgagcatttgccccgccgaatccaaaggaactgactccggcgcggcgcggaatttcatttccttttcgatcttttaatctggcccacttcatagttttattgacaatatgaaacggtgttccgcttaattgaatgtaagggttcagctccttaacatgaagtgtggcaggcaatgttttatacttcatggatagtaatactttaatcagccccggcattccagaggcgggctctaaatgaccgatattcgtttttactgaaccgatgccgcaatattggtcatgattctttcctggatgcggctcaaaagatccaaacgcttttttcaagccttcaatctcaatcggatctcccagttctgttccggttccgtgtgcttcaatataagatatcgtatcaacaggaatatcggcatttttgtaaacagacgttattagttctgcctgagcttccgggttcggagcggtcaatgaagcagatcttcctccgtgattttctccggttcctctcaggactccgtaaatattgtctctgtcattcattgccgcttgcaatggtttcaataacagaacagctgcaccttcaccgcggacataaccgtcggcaagtttatcaaacgtcttacaccggccgtccctagacaaaataccgagtttatcggtatacatatgcgtgactggatctaagagcagcgaaaccccgcctgctaccgccagctcactttcgccattttgaatcgagcgcacagctctgtggattgctacaagactgcttgagcaggctgtatcaatggactcactcggacctctgaaattaaaatagtgggatacacgattgctgatgagcgcctggctgtttccggttcccgcaaacgcatgcgccccgtccgaatgcctcatcagcagctggcggtaatcattaaattgaatgcccgtaaacaccccgatatgtttgccggacagctttgaagctttgtaacccgcatcttctatcgctttccaggtttcctgcaaataaattctgtgctgaggatccatgagttctgcttcccgcggattaatattgaaaaacgcctcatcaaatttatcggcatctgtgataaatccgccccatttcgaatgtacttcgctgcttcctttgccttcggcgtattttttccaatcccatcgatccgggggaatttcctgaatcgaatctttttcattgattaaattgatccaaaactcatctgcattttttgctcccggaaaaacacaactcatcccgataatggcaaccggctgcttctccggatgatggtcagcctgtcttgctgtctttttttcaaacggaaaacttcgcggcggcttcacggttttccctgcggttttcccggcgtgcactttccttttttcagaaatatttttttctgcacctgtattcccttttgcaacagtacgcagttcactgtttaggaattctgaaagagactttatatggctgtaagtaaagaaaacggcaggtgtcagcttaagcttgtattttttattcagtctgacagctaatgttttcaaactgatagaatcaaagccgagattgccgaaattctctgccgtatccagctgttcaatgttaattttcaataattccgacaccatttgtttcagttcttcaaggacattgtctgcagaacccggtcctctataagaactttcctcttgacgaaccggaagcgtatttactttttgatgcggcagatctttttttgctggtgttgttccggcatccccggtaacaaccgaaatttgcggacagtcacttgccaaaattgtctcaaaagccgctatcccttcttccgtttccaaataatcaaacccggatgcggaaagatatgcgtcttcagcttctttgtttaaatgcattccgcctttacgccacaacggccagttaatcgaaatgctcttgccttgtctctcttgcctgcggctctgttcggatctccaatttatatattgatcttgaaaataattgcccaacgcatagttaacctgtccaaaatctccgaagaccgaagaaatagaagaaaatacgataaagaaatcaagcggctcatctttcgttaattcatctaagcataccgttccttcaattttagcagtcatgccttccgtaaaatcagtcagattcatctctgtaaataaccgatcatcggcatgaccagctgaatgaataacgccttgaatggatccccaagtccgtttcgtttcttctatgacccatcccatcgtcttttgatctgcggcatcagcttgataatataccgcgtctcctccaagcgcctgcagccggtcaatgttatgtcgtttatcagctgttaacggtgatcttcccgtcaatactaattttgcttgatactgagaggctaaatattttgcaaaaatcaggcccagaccgcccaaaccgcccgttatgaggtaaatccctttctgtttcagctgatgagagtgctctgtatgattgaatacatactcctttaatgtcttaacatacctcttgtcatttatatatttaacttcttccgcctgccgttccacgcctgaaaccatttcgttaagacaaaattcagccattttttcaattgatatacgttctgaaaaaccgattgacttcacattctctgcggatggcaccaacatatttgccgtttttaaacagcctgcaagagcgcccgtatacggatcattcatgccttttttaaaagagtgaacaagaagcagagaatgaagataaagagaggcgtcactgcgggcgctcagggcttttaataaataaaaaattgattccaggccgctgagaaggcggtcacccgcgtaaaatgtttctcccgtgtgcaagatgacatcaggagaaaacccttttttctccaattcttcgaataaacgaatataatctgacgtcacttccgggtttatacagaatgtcagcagattttgatcggtctgccgctgatccggcgtgacgagaatgacacggctgtctgattgatttttcagagcttcagccaacgcttcatcttttgcaaagaccagaattgtttttggctccctatctttcatttcaatcagagggtttttttgatcccactcatgctcataaaaacgtacatttttattaggcttttcgccaaaaaccagcccgctcagttccatcaaaatcccgccggcattgtctaatacatacacatcataagccgaatcgctttcttcagtttgttctgcatatacataaacgggttcagtctcatgatcaaaaatcgtacattctttaatattttccggggtctctccggcattttcccccgcaaggtatacgacggcttgatatgcgctctcaatcacttccggtttgattatgcaccctttcggcccggcctttgcttttatctttaaaagcacctgtccgttcctgctgacgcagtgctctgcggctttcagactgtcactgcagctgtatccgaattcggcaagccgctgataaaacgcttcgtacggtatacggtctgcgccctgagacaggaacggctcaagatgaatatttccgttctcgtacgccccgccttctaattcgagccgccctgaggaataaatggataagtcgctctgtttttctatagaatacgatgcaccctgattatccggggttaatacaatccggatctgctcattgcttccgctttgtaacatcggttctctaaaggagagctcagttaatttaataatcggattccctgaagccatcgctccggcagctctcgccatttcaatctggctgagaaacggaaacatttccttgtcttgatactttgtttttatatacaaaccggtatcgcttacattgataagaaacttctgggctttaaaatcagatatattgcatgaaatgtaaggatgcagatcgttatttacgttcatccggcggcttcccgtattttgcgcatctattctgcatagctctttggcaaatggatatcccggtgctgatacccgtctcaaagtgacatctttataaagtgacagccaatctactccattaccgccaacccagtattcagcaatcttcacaagatccctgtttgcggctgattcttcaatttcagctttgttcgtcctttgagcttctgttgtgtctttgccgcttgtaaaaatatgatccctcgcatttccgagagtatagtctgtcagccctttaagcaattcatctcttgtggaggcgataacagccaatctgtgcggcatttcttctctcccggtttgtaaagtaaatgctgtatttctaagtgtttctaatgaataatctctggctgctatttgttcttttgcgcgttttgcatattctgccagcctgtcggcattttttgcagaaaaaacaaataaaagctgttcaggttcttcagccgcgagaggagagatagcttcatccgcaaattcttctaaaataacatgggcattagctcctcctgccccgaaagaactgattccggcacgcctgggaacggatgactcccatttttcggctctgtccggtacataaaaaggtgttttttgaaacggtatattctcattcaattcagcagaatgagtcagtgacggaacaatcgttttatgtttcatttgaagaataactttcgtaatgcccgctatgcctgcagcagcctcaagatgtccgatatttgatttaaccgacccgatcgcgcatgtcttcttatcgcgttcggcacctgaaaatgctttggtcaggccggtgatttcaatcggatctcctaacgcggtgcctgttccgtgagcttctatatagctgatgcttttgggatcaatacatcctttttttaaggctctcgtaatgacctcactttgagcttttggattcggcacggtatatccattcgtcttagcaccgtggttgatcgctgttgccttaataactgaataaatctgatcaccgtcggcaatagccttttttacgggtttcagcagcacggcacctgtcccttctcccggcacatagccgtctcctcctgaaccgaagcttctgcaccggccatcactggataaaaatcctccttgagtcaggagttcatatttatgaggatgaatggataaattgacgcctcctgcaattgcaatttcacattcattcctgattaaactttcacaggcaaaatgaacagccgttaatgatgaggaacacatcgtgtccaaagcaatacttggcccgctgaaattaaagaagtaggatacccggtttgcgattgatgcaaatgaggaagaaacggccgcttcgtgaccaacgctgtacagctgatattggccgtacataacccctgcaaaaacaccgacgttttttctttcaagcgttttctttgcgtacccggcatcttctatggtgtgccaaaccgtctctaaaaacagtctctcctgcggatcaattaattcagcttcggcaggagaaatattaaagaacaacggatcaaaatgatacacatcgtcaataaatcccccccatttgctttggttttttacttcgtcgcccgccgcaggctgatagtgcagcctcgaatcccaccgatcctcaggtatctcagttatacagtctttaccgttcaataagttttcccacagagtatcaagatcatttgccatcgggtaacgtccgctgataccgataatagcgatatcattgtcatgatacttctcctgctgcacctgatttttcatctggattttctgtttcccgttaacatcggctgtctgtttattatcttttttcttctgagatggagtgccgctcccgttttctcctaaccggagtttatgaagaagagtatccctgtgctcctcaacgaaatactgtgacaattctgccgcagtctgatattcgaataacagcgtttttgagagcgcgccgaaatgtttttcaagctcattcgtcatattgataatcataacggaatcaagtccgtatttttccaatgcctcttctgcatctattttgtccgcaggcatcctgaattctgcagcaattatttttatgataaaatcagatgtttcagctgtcagtttctctgaatcaaatgattcgatatttctccctgttccttcatctgcctgaatattgtcttttcgttcatataattgatgaacatgattgtcaatttgctcatctccgtaaaatacagtgaattgcgaaaaaccggaggacaatgcgacggcaaacgcttttttaccttcttctttttctaaaggataaaaacccgcctttttcattgtctctaccgttcgctcatccacttgcatgccgacttctttccacagcggccagttcagagagagagaaatcgtatcagaatgctgggcagaacgcatattcataaaatgatccatataactgtttccgaacgcgtaatcagattgcccgacatttcccaacactgcggaagtagaggagaagcaaatgaaaaagtcaggattttctttctcaacagcatcattcagccacatcgtacccaatactttcggtctgattacctgatcgaattcctctcgtgacttgttaagaaggaaagaatcccggatgattcccgcgccctgaatgaccccgtttacttttccataagaagttttggcttttttgactacatattcggcttcttccttattggtaatatcagcctgaacataaacagctgaagaaccggcatcctccaatcgcctcagctgttttcttatatgatctgaaagcggagatctacctgttaaaacaaggcagcattttgtttgaaaagccaaatattctgcaaaggtaaatcctaatccgcccgcgccgcccgcgataatatatactccattttctctcagcggcacagctccgcttccggaatttttttcgggttcatacgttttgagctgtttgacataacgctgcatgtctttataacggatctctacatctgaaggctggaaatcactcagctcattgcgtatgatatcagctgcgtgaacggctgctattgactgctccatttcaatgctttttgctgagattaacggattttccagctgtaatgtccgcaaaaatccgcttgccgccgcgtaaagaggctgttctccggaaagatgcgaaaaatatccatataacagcttgatcggtttgcggcagttatttttgaagagcgcctgttgtaataaaaacaaagaatagactccgctgtcgcattgttcacgaattgctctctctgttttttcaaacggcatgtctgaccataaatgcaccgcttcccgtatatctgacttctcttcttctataagccatcctaacaggtttatgtaatctttttcagagcgggggtcgatttcaaatacaccgtccccggtttttcgaaactctttccccggcttaaccaaaataacccttgtatcatgcaatgcagcaagttctttactcacatcttcatttttatcaaataataaaaggctgccctcacgccggccgccttttacatgtatgctgagatctgtccgctgccagaccgtctgataatatatcgcctgtccgttaccccctgcggaatgagaaccaagctgctgtatccgctttactccttcttccaaagaaatgatgccgctttctatgtcagaaagtactttttttctaatatgacgggcttctttcataaaaatcttcatcccctttacaaatggcactgccgcaaaatgataaactaatcctgcatatgctccagcgcataatctgcttcttcggcagtcagttcgcccgcttttaattgtctgagaagctcttttactctctcgttctttccattggaatccgctgttgcacgagtctgtgcctccgcggaaaacgtttcttttttacgaatggttacatccttcaaacctgcaagtctttctccttgttcattaagcagctgaatatcgtaaataagctcggattgacctttttggcctgttttacgcgcatatgcccagcattctgctgaaacttttttccgaatcgtaatctctcctattgaaaaaggaacataaacagatgcctcttctcttccgtccgtaatcccgaacaaagattgcagagccccatcaattaaagacggatgcaatgtataattttcaagagcatatgcggcttcttttggcagcaataagtgtgcaaccgcttctgtttttccgccccataaacgttgaatcggctgaaaagcgcgcccatacaggaacccgttttcccgaaaatacttgtaacattcatcttgttcacggacaaaagcacttctgtttatcatctcttgtctgtcgatattctctatatcatcatcaccgtaatgatgatcataatctaattcccccgtcacaaatccagtccttacagcagcatcctcgtcagatgacatattaaataatattttgccgtcttttacggaaatgtgagtgtaaatggtcagactctcttgcaaaagcatggccggtcttgcaaagatcacgttttttaaacgagtgacctctttctttcgatatgaccgcgttcccgctgcgcatgccatttcaagaaaagcagctgccgggagaatgctcttgttttttacgatgtggtcttttaaccaaatctctttttctcttaatgtcgttttaaaaaactgctgttccagagtagattcattcgaatccagaagcgggtgcagtgaagactgctgcggcaatatttccggaaatattgcgctttgatttcgaggcacccagtaagactcctcagcaaatggatataaaggaagcttgaccttttgcggggtatactcttcatataactctctccattgaatatcagccccgaaagaccataattttgctagaagattcaagtcctttgtctccatcatcacttcgaggaatttatctttcatcttttgatcatgaaagataaagactttatcaaaatcttttgtaacattgcctttgtatacgccctctccaattgttccttcagtacagaaagttctcagcttctccttaagttccggcaaatcggaagctacaacagcaagtctgtcttccataggctccctgcatgtctgcaatgtaaaagcgatatcagctgccgaggctgttgtctcccgctctgtgaattgcagaaggcgccgggcgtattctttcagtctgtcttcatttttggcagaaagaactgcggcaaacggaccgcttattgtttgtgtgtccgcatggttttgatattcctccacaatgacatgggcatttgctcctcccgctccgaacgaactgattgctgctctcctgttagaggcgcctgattctttccgccactcttcttctttctgctgaacgtaaaaaggcgtcttttcaaatcggatattttggttcagctgttccgagtgaatggatggcgccaacttctgatgcttaaattgtaaaagaacttttgtaagggctgctatacctgcggcagactccaaatgtccgatattagacttcactgaacctatggcacaaaattgtttatcatccgtaaatttctcaaaagcttttgtcaatcctgcgatctcaatcggatctccgagcgaggtacccgttccgtgtgcttccaagtagctgacggatcgcggactgatgcccgatttcttgaaattttcagcaatcagctcagcttgtgcattcggattcggaaccgtaaatccattggtttttccgccatgatttacagatgttcctttaatcactccgtatatatgatcctgatcagcaattgctttttccagaggtttcaacagaacggctcccgaaccttctcccgggacatagccgtctccgccctctccgaaacttctgcacaatccttcggtggaaacaaaattaccttgactcagccaaaggtatttgctggggtgtatggatacattaacgccgcctgcaagcgcaatttcactttcccctcttttaatgctctcacatgccaagtgaatggccgtcagcgatgatgaacacatcgtatccagtgcaatgctcgggccggagagattaaaaaagtacgaaaccctgttggcaatagatgaaaagaaggaactgagcgcaatcggattgccccgcgcagtttcttctgcgccgaataattgatattgtccgtacatggctccgacaaatacaccggctttcataccgttaagcttctcttttgtatatcctgaatcttcaaacgtatgccaggaggtttcgagaaaaattcgctcctgagggtccatcagctcagcttctttatgagaaatgtggaaaaacagcggatcgaattgatcaacaccgctgataaaaccgccccacttactgttgattttccccttctccattctgtcgggactgtaattcgatctgaaatcccaacgttcctcggggatttcaataatacagtttttccctccggcaatgttttcccagaactcctcaagagtatcggaattcggatatcttccgctcacaccgataatggcaatatcctcccccggctgatccatgctcggtgcaggtgtatccttctgctgccggtgctgttttttactcggattttctcttttcttctgtactcttgttaccggagctgcccctgcggccttaagcactttttctttaaaagatgttaggaagaagtttgaaagctcttcaatgttctgatattcaaaaaagattgttttcggaagatccccgaaagtatcttcaagctttgcaataagtgacatgatcataagtgagttgattccgaacttctcaaaagagtctttcgcatttattttatgagcttggattttcaagacaccgctgatgatcttgattaaatagtcattgactttttctttcgcagcatattccgcttcttcatcgtgttccgccgtgagtgtatcttgatctgctgcagctgtatttctttgaatcgaaagcgcctttatcattttatcccgctcaccttctgcaggcattaagctggtaaatgaagaccgcagcattttcagaaacgcttccagaacagaggaagttcgcatcggagtcattccgtatttttcttttatttgaacgattccactgctgtcgagactcattccgccatctttcaataacggccaattgattgatagtgtttttccgtttcgagagagctgggatcgaagcattgcaaaactgtccataaaatgatttgcgtacgcatagtcactttggccggcatttccgtaagcggaaaaagaagaaaagagaacaaaaaaatcaagatcttcgtcttttgtcagctcatccagccagattgtcccgtaaactttcggtttcagtacgtccgtaaaatcaccgggacttttatttacaagaaatgaatcacgaaggatgccggcagcatggatgatcccgtttatgctgccgtaccgctgtttaatgccgaaaatgaatcgctctgcctctgttcgatctgttatgtccgtccgctgatattcaacaatagagccgctctcattaagcatactgatccgttctttttgatcagctgttaaaaaagaacggcctgtaagtataatcacggcttgattttcattagcgatgtgttccgcaaacagcagcccgagttttccggctcctccggtaatgatatatatgccgcctttttgatacgttacagatccgttatcgtgttccggaatatcaataggctgcagccctttcacataacgggtatatgagtctattaaaatctcacattcatccgtttgaatgcgctgcatttcactgattgcagcatcccacatctcggaaaccggaggatttatgtcagaatcctcgtggcgtatctgtatggttttcgctttaagcttggagctttccatgtttaccgttttcacgaaccctccgacagcttcatgaaacggctgattcagaccgcttgtccaataaatatgcaataacgtaacaggttcgtttcttcgcattaaagcttttgataataaaaagagcgagtttatccctctgcgaagagattcattaacagattcttcagtgaattctctgatttctctattccataaataaagcacgacatcaggtgtaaatccgttttcagccaaatcagacagcagcatttcgacatgatgttcatcagaaggattgattgtgcatctattccgttcaattctgtaatcagaatcgggcgttacaagaatgacacggttatgttctccattcatcatctcggcatgctgaaaaagacggttatcctgatcaaaaatcagcatattccccggtgcctgctgattcggcatatcaatgtgatttgtcctgacccaatcggtcttaaaaaaaatggttggggacggagcttgtgattccggctccgcctttttttccatttgttgttttctgtaagtacgaattagctccagtcctgcatcaggagacatttgctgttcttcaattaaggaaagtatttgtttgatctgcactattttccctccagcagctgataaacttggtcagcagaaagttcaccgtttttcaattgttccaataagaagagaatttcctgatcttcatttttatgacctgcggttaattctcccccggtcacttttctgacagagaagtctttcatgctcacggctacttcgccgctctcgttaataaaatcaatgttatacgtataaaaaccggtttctctcaccgaaacatggcatcgggcagtaagcgccctcttaatgtgaagctctctaagtgaataaggaacaaataagccgtctttctcattttctcttaacaaaaatgcagccgcttgaaaaccgccgtcaattaatgaaggatggagtgtaaaatgtgaaaacccgttcgctaaatgatccggaagctccaattctgccattaactccacatcaccgcgatatacggctttcaacgtttgaaaaccgctctgatatgtcaggcccatacgactgaagcggtgataacactctttccggcttatgaccgttttactgctgcgtatgaactgatcaatatcgacatactcaggattgctgtttatgtctccgaatactgtttcacattgtgtgcagatttgctgcacgccatccgggccctctttacatatcgttgcgttcaacttatcttgtttcatttccaagccggtataaatgtgcagcgtttttcctttatataatataggtctgttccacatcacgtcttttattttatatactttactttctccgcttatttccgcacaaactagagccatttcaagcgaagcggctcccggcaacacacagtctcctgaaacaaggtgatcagtgacgaaaaattcagttccggaaataacagttttaaatgcttgtttctttaatgttgagacattctcgctgattaatgggtgaagacttttgctattaacctcgcctttgttctttttcggagtaaaccaataactctcttttgcaaacggataagacggcagcggcactctattcaatttctcattgccgatggtcttccattcaaactcggctccattggcccaccattgtgcgagcagctcctcctttccgctttgaagagcctcctgaatcatatattcagaaacagctgcacgctcttcagtgttttcgcttataaatacgccattttgcaccttgcttttatcaagaaagctgacgtatttatctctcagctcagtcagactcactgcacatacggcaattctctcgttcattgcttcccggccgttttgcaatgtaaattccatgtcactggcattaacggtcatgtcaccggcaatcacgcgatccaagtactgaaccataagccggatatactcaagtaattgatctttggttttcgcagataaaacaaaaatgtgtgttttaccgttgttttccggtacttctttttgaggttccctatattcctctaaaacaatatgtgcgttcacaccgccgaatccgaatgagctgacacctgctctcctcggcagatcgttgttctcttcatcttttatcggattccacttttgagcggtttctgtgatataaaatggcgtattttccattttgatgtatggattgagttctgaaaaatgggcgagtcccggaagtttgcgatatttaaaagccagtaacactttcagcactccggctattccggcagcggtttcgagatggccgatgtttgttttcacagacccgattccgcagcttttctgtttctcaaaaggaatgtcccattcttgatataacgttttaaatgcctttatgatgctgtttacttcaatcggatcgccaagacttgtccctgtgccatgcgcttctatatatcccgcagtggcgggactgacccccgccttccgccaagcttcggttaataagtccgcctgtgcgttcggattcggagctgtcaaagaattggcgcggccgccgtgatttacagctgaccctttaatcaaaccataaatatgatcaccgtctgcctgtgctttgctgagcggcttaagcagtactgcagccgccccttcactccttacatagccgtcagcgcttttatcaaacgttttgcactttccgtctttggaaagcatacctgctttatcaaaagctataaacagagtagggcttgtcataatatgcactccgcctgcaatcgccatttcaaaatcgcctctttgaatcccctcagccgcacgatggagtgcaactaatgaacttgaacaggcagtgtcaatcggttcgctcggacccgtcaggttcagctggtaagaaatacgattagccaatatacaatgatttaaaccggttgcggtctgcgcctgaacagagacgccattttcattgagacgttccgcatagtccgttgtggcgacccctgcaaacaccgcggttttcgtccctgccagatctgacggcttatagcccgcatcttctattgttttccatacagtctccataaaaattctttgctggggatccattaattctgcttcggcgggagaaatcccgaaaaacaacggatcaaaactgtccgcgcctttgataaatccgcctttttttatttttgttctattgacgtccctgatcggatcgccgtcaaactctttccagtcccaacggtcttcaggaatgtctgtaatcatatcccgccctttttcaattccttcccaaaagtcttccagcgtatctgtttgggggaaacggccgcttattcccactattgcaaccggctcattcatatgtctttcctcttgcctggttttgttttcaggctcaggggaatgttcataggattccggcggaggcgtgctgtacaatgttttttcgtctgctgcagaaaaaggttctgtctcagcaaaaaggatttctccgtattgctcgattacataatcagtcagttcagccagtgaattgcattcaaagaaaatggacggcaataattccgtaccatattgttgattgatttcatttccgagtctggtaaacgtaatagaatcaaatccgtactcgccgaatgaagtctcttcttccatttcctttctgtcaatctttaaaatactggacatcatctttgcgatgccctcaatcagattttctctcctgtctttcgccgcagattcatctgaagaaaaagatccgcagagatgaagctcttcggaatactcactctttaaaaactcaagaagttcattaaaatcagtaagaccgaaaaaatctgacggcatcattgatattcctaatgtttcgtttaattcgttgcccagcattgtaaacataattgaatcaaatccgtattcacttatcggcagttcaaaatcaaattcccgttcttcaatttttaatacgccggtgatgatgcgcgtcaaagtgctttttaaagattcagttattgacagctctttcggttcgtgattttcgtcggcgattgccgggtcactttttccgctgtcaatcgttatcattcgttccagctttaattcattaccgctaaataccattatttgatgttcacaccctgtcattgcttgatcaaatgctgcaaggccttcccgttttcccagaggcagcattccgaaacggtcataaaggaacttctctgaatgaatgtcaatttgcataccgccttctttccataaaggccaattaatcgagactgtttttccaggtttattttccgccgctctcatttccgcaaagtaatccataaaccggtttgcataagcataatcagtttgtccggcattcccgattattgcgctgatagatgaaaacataacaaaaaagtccagaggttctctgtctgtataccggtcaagccatatcgttccgtaaaccttgctggccaggactgaatcgagatcctcttcacgcttattgatgagtaatgaatcttttatcacaccggcgctgtgaataactcctttaacaggacctaatttgtttttgacgagttttatcaggttgttgacattttccttatcagaaatatcggtttttacataaaaaacttctgatccgtttttttcgagctcttttacattgcttacggcttcctcagaaagctctgacctgccgataagcacaagctttattctcccttttcgcacaagatgtctggcaaaaatcaggcccaggccgcctgttcctcctgtaataaggtaaactcccccttcttttacttccatctttttggggggctctgccctttcaatttctgcagagtgtttcacctgcctgattccatctctgtatctgatctctgaagcatcatcgctgatgactgtttctttcacaaggttttttaattcaggcagaccggtgttcagctgtaactgaatttcatcgctgtgtatttcaatatttttaccggacaacattggatgttctaaatgaagcgacctaaaaaagccgctgattgccatttgataaggtaagatttgattgttccttgtgaaaaatacatgtgatatcagaattttatgtcttgggattgttgctaacagagctttcgttacattgaaaaccggcaaaacagcctcttccagcttttcatgaatgttatgctcaattcccgtttcagggctcatcccgattaaaatgacgcggtcaattgtcacttgtctttctttaagaatcgccagcaatttcttatagccttcaagtttgacgctgttcaattcaaaggaatcagcttctttttcttgaaaacttccgccatggcggacaaagatcatgttcaggccgatatctttatatgcctggcggatcagcggttctgatatatcctgacggagtgaaattacaaggcagctgtttaaaccgctgccttcaggctgatgaagcataggggcccgcttccacatatcagagtaatacttagctgaatgccgctcattttgagtctgcggtgcagcccttaatgccttcaacgctaagttttttattttaagacttacagatccgtgttcatccataaatagtatatgaaaccttttgacatcatcatgttgtctttcatcggcagctgtaatgtaagcatagccgcttgccgaaggtggttgaagaatttccagctcacctaattcaaaaggcaaatatgcggtatgatcgtcttcctgaccggacgtaaacccgattgtggattgaaaaatgccatccaataaacacggttccagcagcccgccggattttttatcaatgctctcaggaagtgatattcgtgcaagaacagcattttcatggataagcagctgttttattacctgaaagccggctccatagtccaaaccgctctgccggaagtttctataacactcagcgccgctgattaatcttttctgtccggttaaccagctgtccaatttaaaatgctctgtatgagaggcgtctttatctccgcatgtcataatgtttccttggcaatgaactgccgcttcagattgcatatcggttttcaccacaaatctgccgtctttttgattcggcagcagatctatcattatcgtcttttctttttcaacggttatcggaaccgcccatacaacctgactcagttttatgactgattttccgtacagcctctctcccgcttctctggccgcttcgatgattgccgctccgggcagaaccatattcccatgcacaacatggtcttttaaataatattcagaatctgaaagcgttttataaaatcggcactcaccggcagaaaaatcaaataaaggagctgtaccggctgctgatgttgtttgcgccttatttgacacccacagtctgttttttaagaaagggtaagtcggcagcgcaatttttgccggttttctgccggtgcggaaatcttcccagcttaaactccctcccgatacccagaattcagccatgtcggctaatgtggttctgccggaattgagcggaagatccgattgccgctgtccgcgtttatgattcggttttttccctctgaatatttcgtgatcgtcaattccattataaaagtgatttaatttcaacatcaggtcatcgatatttttcgaaatgacagcaagcctttccggcatggcttcccgcccttcaagaagggtatatgcaatatcagaaaggtgaagcggcttatttgttcccgccggctgtaaacactcgccctgcttatgacgagccttttgaagatattcctccagcttttttgctgattcccgtaaactcagtgaatgcttggctgagagtacgataagttcttcactttcctcacgccccgtttgacagtcagcagcagactcatactcttccacaagaatatgagcatttgccccgcccgctccgaaagaacttaatcccgcacgccgcggatatttgctgtcagaatgtttttcattcgcgggttttatccagtcggcagtttcctgctggagacaaaaaggtgtctcttccagataaagatccggatgcacccgttcagcatgcagtgttgcggctatttttttatacttcatttgtaaaataatctttgtcaggccggcaatacccgcggccgcttcgagatgaccgatgttagatttaatcgatccgagagagcaatatgaaacatcttcggtataagctctgaacgccttggtcagacctcggacttcaatcgggtcacccagcggcgttcccgtgccgtgtgcttcaataaagctgacacttctggcgctccaaccggccgctttaagagctccttgaattaaatccgcctgtgcggcaggattaggcaccgtatagccattcgtctttccgccatggttaattgccgttccttttatgacggcgtacacagtatcattatcacgtatggcatctttaagcggtttaagaataacggccccgacaccttctccgggcacgaaaccgtcgccgccttctccaaaacttctgcattttcccgattttgaaagcattcccatctgacaccggtataaatagtcagaaggatgaagatacaaatttactcctcccgcaaccgcaaccgagcactcacctttttttaaactttggcaagccatgtgaattgccgttaaggatgaagagcaagccgtatctacagggatactgggacccgtaaaatcaaatgtgtaagacactctgttcgcgagagaccacgggaacgaatttggaagtacatcgtttttgtccgtcggtattctttcgccgagcagcttgtaagaattggttgtaactcccgcaaatacaccgacatgtttttcggtctgctttctcaacccttcaatggtatatcccgaatcttcaaatgctttccatacggtttcgagaaatattcgttcctgaggatccatcgcttctgcttctctcggcgatatttggaaaaacaaagaatcaaatgattcagcattctttaaaaatccgccccatttgcaataaattttcccctcatgcgctttagcgggatctggatcatagtaggtctcataattccatcgttctttcggaatttctgtgattgaggttctctcttttgatagaagatcccacaattcttcgatattttcagccccgggataacggccgctgataccgattaccgctatcccgtcaagatgttctttttcctccgccgcagatgcagtggtgttttgttccggcctggcgggggtaatgctctgaatctgttttcctttttcctcccgtgaaaataaacgtcccagccgatccgggtattcttttacaagatgatctgctaaatctctgattgtatgaaattcaaataaaagcgttttcgaaattgctcccagtgactgctccagctttgtgttgcattgatgaatcataacggaatccattccatattcagccagatgcacatcttgatcgatctcttcccgttctgcaccgacctcacaggagatgatattggttaaaaacaaaactgtctgatccaaaatatcgccttgagccaaaggaacggcactgcctgtctctgtttcgtccgtcaaaaatctctgctgcataaattgttcaaagcgttcatgatcaccgcagactgcaatattatgcagctgacccgaagttacaatccgcgaaaaccattgcgttccgtcttcagcaggaagttcttcgagccctgaaccatgaaaaagagacgtccgcccttgacctgacaggttcgcccccattccgatgtcttgccataaaggccaattgattgtcagggtgcggccgctgcgcagagaattttgccgtttctgttcccgatattcggcaaaatgatctaaaaagccgtttgcatatgcataatcacactgaccttcgttgcctgcaatagagacgactgaagaaaaaacggcgaaaaaatctaattcgagcgacttcgttgcatgatcaagattcaatgcgccatgaactttcggagcaatcacctctgaaagttcatgctttgtttttcgaaaaagcagcgagtctctgataactcctgcacaatgaatgacgccatgaagacctgcatgctgatcggtaataccgtcaatcattttttttaccgcttctttatcggatatattcgcctgtatataataaaccttggctttaaagctgttcaggtattctaaatgtttctgcttatctccgtttaaaacagatcgccccgataggataatggtggatctttcagttttcgcgcaatattcagcgattttactgccaatccccccaaatccccctgtaattaaatatactttatctttttcagggtattgaatggtctttctgtttgtttctctctgcttctctaacatccgtgcatatcttacgcagcctctgtaagtgatatgaatatgccgatcaggcgctgtgtttatttctttataaagaatgtcagccttctctgaacatgaaacggatgcagaatcatgttcaaagcaaaccgtcttacaatgcagctgcgggtactcttgttttaccgattttaaaaaaccgttcacaccttcaaaatacggcaatttttctttttgatctgcgctgaatgtataaatgaacgttactttgtttataaggttctcgctgattaaagccttagtcagataaaacacagaataaattcctgatgcgagtgtttcttccagttcaggctgtttttcagaccaagtatgcaaaattgcatcgggcgctgcgcctttttcctttaacagacgaatgacaccttgataatcttcgggacactgcctgttgatggtgaaaacactgtcgcttatctgctctaaacggtcaccgggcataataagatatgcggacgtattctctctttttttcagctcttcaaaatagtctttattcccggagaacaacaaaatagtacaggcttgtccgctgcccgcttcattctcaagtgcggtttctttccataccggcgtataaagtgcctgattcttcttttctgaaaaagccgcgtctgattttaccggctgagggtttaaagaaaattgagagcgctcaaacggataaggcggaagcggggcttttcttttatgataatcacctagtttcgcccattcaatctcttctcctgaaagccacatttgcataaatgaatgataaagagcctcatcagctggtttgtccgcttcaaaagcagccgctttgtttagttttgctgatggagggagcgatccgaattgaaaaactgaaaaatcagagatattcacatccggctccgttcccttttcttccgtgtgaagcggcatatggtcagctatctcctgaaacacggcatccatctgattgtattctgtcatcagcggaaaacgggccttatcataaaaacctgccggctgctcattcatacaagcaacagcctgtttaattccgtcttgctttttcaataacatgctcagaaaaagttctttagacaagattccttcatccagtaaatttaatatttccagaacataatcattatcaaagaatccatcataatctgttaaatcccatctcttatacagtcttctcatagaggcaaggatagccatgatcgccgcttcctcttcagccggcaatgcgtttcttttatccgccgtgcgattcacaatataagataaaatctcgatttcctgagtctttcccgctttatcccactcttctaaaaaccctttaaacgtatattggtgctcaagaagcagccgtgttttcccgtacaggcggtctgtaaaatcagccgggaagctcagaccgttcagcagcatccttacatattcttcatttaatcgaaccggcgggtacgtttttgaagtgtacggattgacaaatggaatggacggcggctcgcaggataagtgcgaaggtttttcagcgcctgtgatgacagaaatggccttttcaattttgatgatatccgctgctgcaagagcgacgtaatatccgtctccggcgcctgtaatgagacttggcttaaaaccggatgccaggatactttttatgatttccgtattgataactaaagaatacaagcggattttctcaggcgtccattttcttttaaatgaactgtgcaatgctggtatacccttcagcaccgaccttacgttcttttctagatcagggaacacgcgtttcaaaacggcaaattgtttataactttcccatttgaagtcaccgatggcaagcgcccattcagaatcatgtttcctccgaaaacttaatccctctttaagctgatttttaaattcctccttgctgcctgccaataaacccgccctgtaatcaaacgatgtccttgttaaaagggtgctgctgatcgcttcatttgatattttgcaaaattcctcagaatcgtcagaaaaggttctccaattatgtatcatttgtttcatgctttcttcacttttagcggaaaaaaggaagggagcccttacctttctgtcagtttcgtcatttgtatgtataaattcttcgatgatgacgtgagagttaacacccccaaaaccgaaggagctgattcccgccctgagcggagccccgtctgccgccttccaatcacttgaatcaagcgccggcctaaacggtgttttttcaaactgtataattggatttaccgtatgtacattcaggcttttcggcaccctccgatgtttcatcatcattagaacttttatcaatccggccattcccgccgctgcttctgtatgaccgatatttgttttcacacttccgattctgcaatattgagtatcctcagtatattgccgatatgcttttgtcaatgcttctatttctatcggatcgcccagagatgtacctgtaccatgtgcttctacataagaaaccgtcgcagcatcaacagcagcgttgtgtaaagcttctgagatgacccggcactgcgcttctgctctgggagcggttatggaacgggatttaccgccatgattaacagccgtcccttttatgatcccgtatatatggtgaccggcttttactgcatcaccaaggcgctgcagcaatacaacgcctgccccttctccgggaacgtacccgttcgccgctgcgtcaaaggttttacatttgccgtcaggactcagcattctggctttagaaaaagaaatatattttccgggttggaaattcaagtttactcccgatgcaattgcataatcgctttcttttgtccgcaatgacttaaccgcttcatgtaaagcaacaagcgacgatgcacaagcggcatttacagacatgctttttccggtcaaaccgaatgtgtatgaaagccggttggagagcatagcttcgaaacttcctaaacaggcgtaactgtcgatttccgattcatgacctgtctgccggtagtcagaattcataatacccgcaaaaacagaagtggttttacgctggagatcccgcaaagagaccccggaatcttcgatgcaccgccaagtttcttctaaaaggattctttgctcaggatccatgtttttcgcttcccggggagagatattaaaaaacttatggtcgaaatggtcagctttatgaataaaacctccccacttgctgattgttttgttcggtatactgatatcagctgagtaataaagatcgggatcccaccgttcaatcggcacttcccggatggaatctttgccgctatttatgttttcccagaattcatgataatgatctgcatcggggaatctgcaagcaaccccgattatcgcgatatccgcactctgtttattcaaatgaaccattggcctccacccgcccctttttagtgtagaaataacgtatccaatctgcgtcttagcagactttcggtctcattcatcattttttcaccaatgtcatcgacatgtctgtttctccatgattccaactccgtgccctttacccaatggttaaaagcgcctaaagacgggccgcaatgaacttggaaattcaccttttgttcttcctccccttccaaagcaagcagacatcctctctgcaaataccacttaaatagtaacagcatcttatatttttgattgcgctccgctttttgggccaggttcggctgtttttctattatgctttcgtagatttcatcaaaagtcttattaaaataaacattttcgagctgaatctttgtctcttcatctatctcactcaaagactcatattgttggtagatttgaaataatttatttgccctgaccggaaacagcgtgccctttttcagcacctgaacctttgttccgaactcaaacagagtctccgaaggcgcataagcagtatcgcatatttctgtctcactcagcatttctttaacaaaaccgcttgttgcggcttcaactgtacattgattaatggatcccgtcataataaaatcagcgcccattaaaaaagcagacgccgcagactcgggagttccgattcctcccgcggccccgactctgatcttccttgcgtatttatgtgtttccatcatttcatcccgcaggttaacaaaaaacggcagcatcgccgtcaatgagccctgttcggtattactgccgcaatctgcttcaataatgatatcgtctgctgacggaacacggctgagccactccgcctgctcttccgtcagcataccgtgctgacacattctctttacgatactttggggaggcggactcagaaatgcggccgcaacttccggccgtgaaactttggcaatgatccgattatgaggtatgaccctgccgcttttgtccatcttcaactgatgcgctttgtaataaattaatggcgcgctgacggaaagatacgaagacgcttctattacccgtacgtcatgcttgatatataaatctatcaattccttttctctatcttgatgatccggctcaaatcgcagattcattccgtagggctggccatttttgagtgtctccttaatagaaataagggcctgttcaatttcccttatagttaaacccgctgtgccaaagaaccccagcattcctttcttcccgaggcggatcagcatttcagcggaagagatccctctatgcatcgcacctgccaaatacgcgtatgtcaaaccgtaatcttctttgaaagattgatcacccaatcgggacaccggtgaagccgcaacgctttctatattttcggccatgaggcccttctctttcccgctttcggaattgtccttgttcccttcagaaaacaagagactgtcttttggcgcactaatattaagcggttcctcatctctttgtatggtttgaattaatttagtcagaatgtttccgggaccgatctcttcaaacacagtgacgccttgtcccattaagtacctgatgctttcagtccatttcaccgagtttgttatttgttcaattaaattccgtttgatatcttcttgtttataaggtcttgccgtatagttagagatgaccgggaaattcaattcagaaaaatgaaactccccgataaattccgcaaattcacgctgtgcactttccatgaaacgagaatgaaaagctccgccgacttgcaatacgatataagctttcgccccttctttttcaaaaaaagaggctgcacgctttatctcttctgcagcccctgctatcacaatttgtgaagatgtattgtaattggcgatatctatttggccgaattcatacttttgaagtattttttttatgtgatgctcatccagtccgatcacggcagccattccgccctcggaagcctcactcattaactcgcctcttttagcaaccagccggagacctgtttcaaaattaaaaacaccggccgcaaaaagcgcagtatattcacccagactatgtcctgcaacagcatcagggcgagtatgaccttcttttaaaccctttaaatattgcagtgcgctcactgtataaattgcaggttgtgtatacttcgtatcagtgagcctctctttttcatctgaaaggcataaatcctttatggagtatcctaaaatatgatctgcctttttaatgagctcactgaattcatcgaataagtctctgcccattcctttaaactgcgctccctgtccgggaaagacgtaagcaagcatttgttttcctccttgttccgtatttctgccgtttcttttcgttccgattgtgatttgtttaacatttttcacttcaatttttaaaattgtcatttactctaagcacccggcaccattacttaataagcattacgaagcaaaataaaaaaacctttatgccggataaaggtttaaaagcaaaaagcatgtacaaagatcatattgccgcaaataatagatagaattttctgataattaaaaccgcattttcattctgttttttatatatcaatataataaaaacatcccaacgtgccgaaacaacgattggttttatgtgaatatttccctaaataaatactataccatgatttacatgttgtcaatgggaaacacacgtatataccaattcttcagccgccatttacaggcggctgaactcggttgttatcagttcatcagcccatgccgatatgccttcactatactattcgcggaataatagttctttctctttgttgtagtctttagtaaattgattgaactcatctgcttgtttatgcactttttcgtaaactgagtttactttgccgatttgctcttccagctgcgataatgtgagctttttatctttaatcagtttataaaggtcctgatcaagtgaaatggctttttcgtactttttgtacaaaagatcataagatgcataccttttttccattaaagcgacagcatgcccggctttttcttttactttcttatcctttatttcttgagaagttttttttgcggattcaaatgctttttttgaatcatcaatactgtctttttctgctttcagatgtttttttcgctgatttgcattgctcagagcctgatcagacagtgtgacgattttcttgtaatcatccatattcagtttaaccgcgctgtcgtaaagcttgtgctcttttttctccaatttttccaatgttttctgctctttttgaaacggtttttccgcttgaacggctttttccatcgagtcatgaagcgattcaaccggatcttttcccccgcagcccgcaagcagcatacttgcggcgccgagcgctccgattcctgctaatacctttttttgaatcatattcacttaaaatcccccaatcttgacaatttccactatagaagcccgaacgctttttgacaatagctgagctgtaattggcatgaccgggtaaaaagatgcttacggtgctgtcaaagaatacttgcgtaaaaaattgagaaaacagggcggatgaccatacatctttttggcttttacatagtttatagtagacgccggccctgctgacaaagggtcagcgtaattaaaagaggaggtttttttatgtacggatatggatttggcggcggatttggcggcggatttggcggcggttgctgcggcggatacggttatggcggttacggttatggctgcggcggcggatatggccgcacattcgcattaatcgtcgtattgtttatcttattaatcatcgtcggtgccgcttatttaggctgcggctgctgaccttatacaccatgaaaatcggccggcctgctatggccggccaattgtttcgttgcgccgcgataaagaaattcgctataatttacatattaagctttaggagtgaagtttcttgattactatggaaaatattgtacgcgacggacatcccgcgctcagagagatcgctgaagaggttcagcttcccgcttccgacgaagaaaaacagcatcttgctgatatgattgagtttgtgaaaaacagccaaaatcctgaattagccgagaaatacaagcttcgtccgggcgtcggtcttgccgctccgcaaacagacgtaaaaaaacggatgatcgccgtccatgcagaagatgcgaaaggcactttatacagctatgctctttttaaccctaaaatcgtcagccactcagtggaaaaaagctacttgacgagcggagaaggctgcctgtcggtagacgaacccattcccggctatgtgccgcgctacgcccgcatccgcgtaaaggcggtgacgcttgaaggagaacagattgacatccgcctcaaaggttttccggccatcgtgtttcagcacgaaatcgatcatctgaacggcgtgatgttttacgatcatatcgataaagaaaatccgttcaaagaacctgaaaacgccattgccattgaccgttaaaaaaaccggcacttcccaaagtgccggttttctttatttcaaaaggcccagttctttgacggcccagctgattccctcttcatccaccggctttgtgacgaaatcggcggcagcttttaattccggaaccgcatttcccatcgccaccccggtgccggcaaaacggatcatctcaaggtcatttagtccgtcgccgaatgcataagtgtcacttacgccgtacggaagccgctcaagcactcttttaatgccttccgcttttgaaccgcctttcggaagcacatccgttgacaattcatgccagcggacgtaatcaaactccggaaaagcggcatatgctttttcttcatgtccgcggcagaataaaagcagctgataaatttcttttcctttataaaatgtttcatcaacttcgggataaggcgctttcagactgccgataccttccgagacgtgcggatgtccggggacggtcgttttcatcgtgtcttccgccataaatacgacggggtgctccccttctgccgcctgctttaataaacgcgcaaccgcatcttcaggaagcggatttttataaatgacctcaccttcaaatacgacatactggccgttgtatgaaataaatgattcaatctcaagctcttccagaatcggttttaccataaacggggaccttccgctggcgataaaaacgtgatgtccagcctctttaagcgccgtcacggcgtttcttgcgctatcgggaatatgtttatcatggtcatagatcgtgccgtcaatatcaaaaaagatcagttttggtttcatgtcaatttctcctttttcccgtttatcagtcgtgtctttttcaatatcatcatacagaaagtttttcttccggaaaaccgccttgatgaaattccagttttacccacgaaaacaaattcattttttccgcatactactgctataaagggctttaaaggaggtatacgatgctgcgccgattacggaagaaactcagaagacagtggggcggaatgctccggaaaaaagtcatcgcatagaagggatctttcggtttttgaaagtcccttttttgctcgagactttccttataatccgttttcgaatataatagaatcagcgagtctaacatacggcatttaaggagagatttggatgatttataaggtattttatcaagagaaggctgacgaagtacctgttcgggaaaaaacagattcactttacattgagggcgtttcagaacgggacgtcagaacgaaactgaaagatcagaaatacaacattgaatttgttcagcctgtggacggtgcttttttagaatatgagaagcagagcgaaaattttaaagtattggagttatgagcggaatgaaatttgtaaaaaatgaccagactgccgttttcgccctcggcggattgggcgagatcgggaaaaatacgtacggggtgcagtttcaggatgaaattgtactgattgatgcgggaatcaagttcccggaagatgaacttctcggcattgattacgtaatccccgattacacgtatttagtaaaaaatgaagataaaattaaaggtctgtttatcacccacggtcatgaagaccatatcggcggtattccgtacctgctcagacaagtaaatattcccgtttacggcggtaaactcgcgatcggcttacttcggaataaacttgaagagcacgggctgttaagacagaccaaattaaacatcatcggtgaagacgacatcgtgaagttccgcaagacgtctgtatccttcttcagaacgacacacagcattccggattcatacggaatcgtcgtcaaaacaccgccgggcaatatcgtacataccggggactttaagttcgatttcacaccggtaggcgaaccggccaacttgacaaagatggctgaaatcgggaaagaaggcgttttgtgcctgctttctgacagtacaaacagtgaggtgcctgatttcaccatgtcagaacgccgcgtaggcgaaagcattcacgatattttccgaaaagtggacggcagaattatatttgcgacattcgcttcgaatatacaccgtcttcagcaggtgattgaagcagccgttttaaacggcagaaaagttgccgtattcggacgcagtatggaatcggctattgaaatcggacaaaatctcggttacattacctgtcctaaaaatacgtttattgagcataacgaaatcaatcgtatgcctgccaataaggtaacgattttatgtacggggagccaaggtgaaccgatggcggcgttatcacgcatcgctaacgggacgcaccggcagatttccattaatcccggagatacggtcgtcttttcttcctctccgatacccggaaacacaatcagcgtaagccgcaccatcaaccagctgtaccgtgcgggcgcagaagtcattcacggttcattgaatgacattcatacatccggacacggcggacaggaagagcagaaattaatgctccgcctgatcaaaccgaagttctttatgccgattcacggtgagtacagaatgcagaaaatgcacgtcaaactcgcgactgattgcggcatacctgaagaaaactgttttatcatggataatggcgaagtgctggccctcaaaggcgaagaagccgctgtggcaggcaaaattccgtcaggctccgtttacattgacggaagcggaatcggtgatatcggcaatatcgtgctccgcgaccgtcgcattctttcagaagaaggccttgttatcgttgttgtcagcatcaatatggacgactttaaggtttcggcgggacctgatttaatctcaagaggttttgtatatatgagagaatccggtgatttgatcaatgacgcgcagcagctcatttcaaaccatctggagaaagtaatggatcggaaaacaacgcagtggtccgaaattaaaaacgaaattaccgatacgcttgctccgttcctatacgaaaaaacaaaacgccgcccgatgatccttccgatcattatggaggtctaaaaaaactgcactcattacgagtgcagtttttttattgcagcggaatatgctgaaaggctttgacatcaaacagaccggccgccgtcattttaatatccggaatcaccggaagggctaaaaacgataaggtgagaaacggattgaaatcaccggtgaatccaagcagaggaagcttttcatgaagcacgcccaagctgtcattaacccattccgccgacttatcagacaaaagcccggcgatcggaagcggaacggagtgaagcaattctccgtttttcacggctgttaatccgcccccggtgtcacggagcttgttgattgcttttgccaaatcggcatcgtttgtaccgacggcgatgatattatgggaatcgtgagaaatggttgtggcgatggcgccttcttttaacccgaacccttgtacaatcccgagtcctatcattttttcgccgctgtgccgctctgcgacggcgatttttaataaatcattatctgtatcaggtcgaaacgcgtcagcagacggtgcaggcacttctttttttctcgtctccaaatgattcggtatcatttcgattacattcattttcctgccctcttgaatcggtatatgaaaatccgattcagtcagcggcgctttcagccgcactgtatccaacagtgcctggtccggcgaataggaaccggcagactgttcataaaccgtccgtccgttctcggcaacggtccggccggcgaccatggtcttcgtgacggcagcctcccgtacatctgaaatgaacagcagatctgcgtcaaaacccggcgctaccgccccttttgtttcaaggccgtagcactcagccgcatttaagctggcgagctgatacgcaaggaatggatcaagtcccgcctttatcgccattttgacttggtggttcacacttccttctgtaagcagatcatctacatgcttatcatccgtacaaaagaaaaagcggcgcgcgtttttttcattcaccgccggcagcacgttgagcgtattttttgccaccgatccttcgcgcagcatgacgtacattccccgtctgattctgtccagcgcttcttcttttgtcgtcacttcatgatcatttgacaccattgcggttctgtatatattgatgatatctgaagacagtccggctaaatgcccgtcgatccgctttccgtgacgcttggcatcaagcagtttctgaagcatatcctcttcaccttccgcaacagacacataatccattacttccgcaagcccgagcacctctttctcctgataaaaaggctttaaatcctcggcttttaatacagctcctgagcgttcaaagctagcggcgggaacacaggaaggaagcatgaaacggatgttcagcggcgcctttttcgcctgctctatcataaatgaaatgccttttgctccggaaacgttcgcaatttcgtgaggatcagtaatgacagtagtcactccgtgagggaggacggctttagcaaattcaatcggagtaaccatagaggactcgatatgaacatgtccgtcaataaagcccggaacgatcatttggccttctgcatcaatgacttcttccccttcatattcgcccagcccgacgatcactccgcccgtaatggcgatatctgcagaaatccattcctggttaaatacatccatgatttttccgtttttaatgacggtatcggctttttgtctgccggctgatgcattcagccgttcagccagtgtttctttgttcaaaatgcggcctcctctttttctttatatggtacaatatgctatcggatcgcctgatcatagtcaataaaaattgcagaatataccgcttacatgataaatgtctttctattctgacataataaaagaccgtccttttacggacggcttttcactttgtatgaagcactcttttttcaaatcgggaaatgtccgtaagagagccgataacgatgagaatatcttctttttggatcatttcagtcgccagcggagatacgatcacttctttttctctcttgatggccacgatattaatgccgtacttcgcccggatgtccagatcaagcagtgtgttgcccgcaagcctgctgttggccacgatctccacaatgctgtgttcgtcggacagctccaaataatcaagcacattatttgatacgatgttgtgggcgatgcgttttgccatgtcacgttcagggtggacgatgtgatcggccccgattttcgcaagtactttctcatgataatcgttctgcgctttaaccgtgatcgtgttcacgccgagttcctttaagatcagcgtcgttaaaatgctcgcctgtatattttcgccgattgccacaatgacgtggtcaaagttgcgcagccccaagtttttcagcaccgattcatcggttgaatcgccgatgaccgcgtgtgatgcgattttggcgtattcatttactttatcttcatcaatatccatcgccatgacctcaaggccttcttcacttaatgctttgcaaatacttccgccgaagcgtccgagaccgataacggcaaactcttttctcataacagtactcctttaaacaatatctctaataggaatagtatcacattttcggcaatgagttcatatagcgtttaagcttttctgaaaaggcgggtgataaatacaggtccgctccgcgttcgatttcttcctgatagtgacccggaggcgcaatttcctccgctttatcaagaaccagaaacgtcaggacgcctctgtatacacggccgccggcacacacttctatgaacgcgggacggtatgtgtgattatcaacaccttctcttttgtacagataggttgccgcttcaaacgggagcttgtacagcacgccttcagttcgtcccccgtcttcaacaagatcggctctggaaccgtcaggacgccttaacgtgaatctcgtcgaatacccttcaacaaccgcccctccgaccggctcggcaaagaagtggtcgacccccgcctgtttaaaccgggcattgtccatacaggagccgtaagcgaaataataaaccggactgtcatcctcccgtttcataaaacggtattctttccagtctccgcttttgatacggctgaatgaggcacactggccgggctttacgacatatgcgaaggcggttttattcccggcatccgtcgtcacggcaacctctttccggtcaaaatcagcataatacatatccagcttacggatcatctgatgatctgtttcatacaattccccgtacacaaaagctgtttctgctaaagacgccgcaggctgacctttatccgtttcgtacagcacaccgtttatcgcggcctgctcgcacacacatagagcgcctttcagcagttcatggttttcttcacgcttccgtaacaaaccgtatacaaaaagaagcaagttatttttcctccttttggacagcagccgcttctaacggcagaatcacctgaaacgtactgccttctccatttttgctcttaatgttaagtttaccattatgctccttcagaattcgtaaacaaatcggaagcccgagacccgttccctgatcttttgtggagaaaaacggtttcccgatattttcaagcttttctttcgacatgccgtttccttcatcctgtatgctgatcaccgcgtattcttcatcccgttctgtataaatatgaatattcccgccgtcaggcatcgcttcaatcgcatttttaataatattgataaatacctgtttcagctggttttcgtcaccgttgaccatacaggactcagtctgcctgaaatccttctcaatcacagtgttcgacagcaccgcgttcgtgtcaagaagcgtcgccacctgccttaaaatatggttgagatgatgagcggtaaacgtcacggtctgcggcttggcgagcagaagcagctcccccagcacgagatcaatccttttaatctccgaaaaaataatatcgaaataatccgttctttccggatactgggctttcatcagctggagaaagccgctgactgacgttaaaggatttcttacttcatgggcgattcctgccgcaagctccccggcaatggccagcttttgagattgcatggcaaggcgttcgttcgtttccagaagctcgtcgaccgcttttttccgttcactgatatcagacatcgtccccaggctcccgacaaatttctgtctgcggtcataatacagcttataatggacttctccccaaaagatcgtgccgtctcttttaatatatttggccgtaaacattcctgacggggactgctgcttgatttgggagataatataatcaatgatatgtttttcttttataaaataatcattatacatcgtgcccatacattcgctgatggagtggcccgtaatcgtcgtccaggcctgattcaaatatgtaatattcccttgtgaatccgtctgaaaaacgatttcctgcagattgtccatgatccggtttttctcatctgaaagcgcctttgctttctgctcgctgtccttcagctccgccagcagctgctttttattgtccacataataagccagcagccagacgctgattaatgtgacggcggtaaaggtgatgtcaacgggccagttaatcggattccgttcaatcatataaaataaataatcccaaaacataataaaaatcattgccaagattaaggaaatgatacgcgcttgatattttcccatagtcccacctgccgctaacatttctacatatattgtaacattgttgactgcattattgactaaaaaatgataactattcccaattaattgagcaggttcgcttacttttcccgtgagtttttgcacaagttcataataaaaggacggaatgatgccccgccctttttgctgattatgatctatcttttaacgcttcttcgatttcctcaagcagcattttcgctccttcaggacttaaaataattttgccgttgccgtactcctgattttcggaggtaatttccccggtcatcaagcaaatgccgtgcggcttgtatttttttaagacaattttgtctccgtcaacgaaaaattcaatactatctttaatagcgatatccaatgctcttcgcaattcaatcggcatgacaatacgcccgagttcgtctacttttcttactacaccaattgatttcatagaaatcccctacttcctttaatgtctcttctttatgtccaaggaaaatccttcataaacgtagacgaaaggaacggagcaaaagtttctcagcatccggaaatgaatgttttttacaaaagaaagccttttgaaatacgggatacagactttccctccttttttacaaaaacatttcattcccggcggaaacccccaaaaatcgtggtttttctcagaaactttaaatgtagaatcaattaaatcaggatagggattgggtgaaaacatgtttcaatcaactgagatcggaatcgacttaggaaccgctaatatacttgtttacagtaaaaataaaggaattattttaaatgagccttccgttgtcgctgtagatacaacaacgaaagcggtgcttgccatcggaacggatgccaaaagcatgatcggaaagacgccggggaaaatcgtcgccgtacggccgatgaaagacggtgtcattgctgattatgatatgacaactgacttattaaaacacattatgaaaaaagccggaaaaaaaatcggaatgaccttccgcaaaccgaatgtcgtcgtctgcacgccttcaggctcaacggccgttgaacgccgcgccatcagtgacgctgtcaaaaactgcggagcgaaaaacgttcacttgattgaagaacccgtagccgctgcaatcggggccgacctccctgttgacgagccggtcgcaaacgtcgtcgtagatatcggcggcggtacgactgaagtcgccatcatctcattcgggggcgtcgtatcctgccactcgatcagaatcggcggcgaccagcttgatgaagatatcgcctcgttcgtcagaaaaaaatacaacctgctgatcggggaacgcacggcagaacaagtgaaaatggaaatcggatttgcattgatcgaacatgtgccggaaacgatggaaatccgcgggcgtgacctcgtaaccggtctgccgaagacaatcagactgcagtctaatgaaattcagcacgcgatgcgtgagtcgctcctgcatattcttgaagcgatcagagcgacgcttgaagattgtccgccggagctcagcggtgatatcgttgaccgcggcgtcgtgttaaccggcggaggctcccttttaaacgggatgaaagaatggctgacagatgaaatcgtcgttcccgttcatttggcggcaaatccgcttgaatcagtggctatcggcactggacgttcattagacgtcatcgacaagctgcaaaaagcgattaaataataagattgtgcttcttttttctccggccggctcatattgtgagaactggagaaacattaaggaggaagcatatgcttagagatgtgggaagacgcgtagcagtagccgtcattttaagcggaattattttggggggtatgagcatttcactggccaatatgccccattctccggccggcggcgccgtaaaactgaatcatccgtaaagacgcagcaaaagctgtgtctttttcgtttgtgctccttcctttcctttatgaggcgatatttgatatgatgagaaaaaccgatgaggaggaatgaacgatgagttcgtttactgaaaagttaaatacatatgctcagctggcggtagaagtcggcgtcaatgtccaaaaaggacagcatgtcgtaatcaatgcctcaactgatgtccgggaacttgtcagactgcttgccaaacattcttatgaaaaaggcgcaaaaaacgtcaccgtaaattggcaggacgatgaactgtccagattaaaatacgagatggcaccttttgaagcgtttgaagagtatcctgaatgggaagcaaaaggaaaagaagagctcgcgaaaaaaggggctgcgtttatttctgtcgtctcatccgaccccgacctgttaaaaggcgctgacggcaaacggattgcagcgttccaaaaagccgccggaaaagcattgcatacatacagacaatatattcaatcagataaggtcagctggacggtgatcggagcggcttcaacaggctgggcgaaaaaagtgttcccggatcagccggaagaaacagccgttcagcttttatgggaagaaattttcaaaacaacccgcgtaaatgaagaaaaccctgtggcagcatggaaaaaacacgatcaaaatcttcatgaaaaagtggaacacctgaacaaaaaacattacagcgccctgcattatcaggctgaaggaacagacttaaccattgaactgccgaaaaaacatgtatgggcaggcgcgggaagcgtgaatgaaagcgggcacgaattcatggccaacatgccgacagaagaggttttcacccttccgcagcgtgacggggtgaacggcacggtttccagcacgaaaccgcttagctacggcggcaacattattgataacttcactcttacctttgaaaacgggcgcattgtcgatgtgaaagctgaaaaaggcgaggagattttaaaaggcatcgtcgaaaccgatgaaggctcacactatctcggtgaagtggccttagtgccgtacgattcaccgatttcacaatcaaatattttattttacaacacactgtacgatgaaaacgcctctaaccacttggcgatcggcagtgcgtatgcctttaatattgagggcggcaaacaaatgacacgggaagagcttgtcaaagagggcttaaatgaaagcattacacacgtagattttatggtcggttccaaagaaatgaatatcgacggcattaccgcggacggcaaaagagaaccgatcttcagaaacggaaactgggcattttaataaaaaaaaggaggcgatcaggcctcctttttatttcgcttcatacatttgcaagttggcgaagacggtttccaaaacaggtgtatcaattgacaagcctttcgctttctcaagcaaaaagccgtgtaaatgatcaccttccgtcaccctgcccttttccatatctctcagcatcgacgatttcatatggtaagacatgcttgtcaatgtgcgataactctcttcttccagaccaggatctttcgggatgccggcagccttgaaaatggctccgatttcagcaaagaggcgctttgccgtgctgcggccgccttctgtttctaaaatcggtccgaccggctgttgaaacagagtggtcactcccgcctgcgcggcaataaacatatattttttccaaatgtccttttcaatatccccgctgatgatgacatccgctttcacgcctgcaaatgcgttttccagctcattcatacgttctgtgcgctccccgttccattcaccgaaaacaaaacggtgggcagcgctcgtatgaagaatttcccctttgtcgttaagggcgctctcaataaagcagaggccgcccagcacctgccgttttgaaaaagcttcaaacagctggttatagtgcctgtatccgtttaaaaaaggaataatgaccgacgaaggcttgacaaacggtttgacatcccgaatgacgtcctgcaaagaatacgcttttgaagcgatgataacggcgtcaaatgctccttcttcgcccgccaacattaatttcggcttgattgaaacatcaccttttgcacttttgacggtcaaacccgtttcttgtaattgttccgcccgtttcttgcggacgagaaatgtaacgtcatttcccttttctgcaagacgcgcgccgatatatccgcccactcccccagctccgacaactaaaaacttcatgatgcattcctccgtctcttttcaatttatgtattcctttattgtaatgggaagtcagaagattgaaaacttttttcataaataaaaaagcagagtctcccctgcttctttattacgcgtatagctcttcaagctttttctgcacatccgcgttttcaagaaattcgtcataagacatttgtttgtcaacaatgcctttaggcgttaattcaatgatgcgattggcaattgtctgtacaaactgatggtcatgagatgaaaacagcatagcgcctttaaagctgattaagccgttgttaagcgctgtaatggattccaaatctaagtggtttgtcggttcatccagaattaagatattcgcgccggaaagcatcgcttttgaaagcatgcagcgtactttttctcctccggaaaggacgtttgattttttgttgacttcttctcctgagaacagcatgcgtcctaagaaaccgcgcagaaagctttcgctttggtcatgcggcgagtattggcggagccagtcgacaaggttcgcatcgctgccgtcaaaatattcgctgttgtctttagggaagtacgcctgagaagtggtcacgccccatttaaatgtgccgctgtctgcttccatttccccggaaatgattttaaacaatgtcgtaacggcaagttcgttgcggcccgtaaatgcgattttgtcttctctgttcataataaagctgacgttatcaagcaccttaaccccgtcaatcgtttttgttaagccttcaacccgcagcacgtcatttccgatctcgcgttccggcgtgaaattgacataaggataacggcgtgatgacggtttgatatcatcaagcgtgattttatcaaggagtttctttcttgatgtcgcctgctttgatttagaggcgttggcgctgaatctggccacgaactcctgaagctgtttaatctgctcttcttttttcttgttggcttcctgagaaagctttaaagcaagctggcttgattcataccagaaatcatagttgccgacgtacacttgaattttattaaaatcaagatcggcgatgtgcgtgcacactttatttaaaaagtgacggtcatgggatacgacgataactgtgttctcaaagttgattaaaaactcttccagccactgaatcgctttcagatccaagtggttggtcggttcatcaagcagcagaacgtccggcttgccgaacagcgcctgtgccaaaagcactttcaccttttctgaaccgcctaagtcggccattttcttcgtatgcaggtcttcagagatgcccagcccctttaacaaaatagcggcttcactttcagcttcccatccgtttaattccgcaaactctccttcaagctcagcggcgcggatgccgtcttcatctgaaaaatcaggcttcatataaatcgcgtctttttcctgcatgacttcgtataaacgtttatgtcccataatgacgactttcagcacttcgcagtcttcatattcaaagtggttctgcttcagaatggcaagacgttcgcccggactcatatggacatcgccggtctgaggctccagctcaccggataaaattttcaaaaatgttgattttccggcaccgtttgcgcctattaatccgtagcagttgcccggcgtaaatttaatattgacatcttcaaataacttgcgatccgcaaaacgcaagctcacattatttacagcaatcatttagaatcctccatcgtgtctatcatcattaaaagtataccatgaataaaggggaagagaaatgtttccctgcgaatatacgggtttgaaaagatgcaggcgtcaaacccggagcgctgtgatacaatagatatatatacatattcatcacggaggaacaagttgaagcttttaacactcacagaatactgtcttatgattttcttcaccggggtttttctggccgtcacaggctttacggcacgtgacatcggcttgtacgtcggaatcgccctcatttatacgttttcgcatctcttttccaaacggatgcttgaaagacgcggcaaagagaagaagcaggtgaatctttttttcagcgttctggccattgtcggatcagtgctggccacggtattgttcatcgccgtcgcggcctcgtttgccaaataaaaacgcctgctgtccgaatcgggcagcgcggcgtttttattttgtctgacgcatatcatgaaacgggaagaacacaaacttcgaggtgccgacgatccggttttcggcaattaagccgaggccgttccggctgtccattgagttcagccgattgtcgcccatgacaaagtatttgcctttcggaacctttacggggccgaaatctcccgtcaggttgactcccagttttttcgcttcttttttattgctcgcgaggtacggttctgcgatttttttgccgtttatgtaaagcgtgtcatttttcatttccaccgtttctcccggttttccgatgagccgctttacataatggactttcgatgtatcgccgttaataatgacgatgtccccccgctcgatttctccgatataattgacgcttttgttgacaaacagtctttcaccgtcatgtaatgtcgggtacattgatgatccttccactaagtacggttcaaacaggaaatggcggattaacagcgcaagtgcaaccgctataatgatggcctttccccattcccaatacgtgttggattttctttttaccgatttttcagaagtaggtttttgttcttcagtcaacgtggttcctcctagacgatcactgtttcggttcatgtaccatctttactttatcacaactcatcacaaaatacataacgcttctatgcgtatatgattgaaaaaagcgcccgtaaaggacgcttttcgcttatttctctactaccggttttttgatgattcccaagataaccgccgttacaatcgctccgatcacgatgctcattaagtaaagcagcggatggttcgtaatgaatgcaacgaatatccctccgtgcggtgcaggaagcgttacccggaaaaactctgtcagtccgcccgctaccgcagaaccgacaacggctgcagggatgacgcgaagcggatcagccgctgcaaacgggatggcgccttctgtaacgaaagctgctcccatgaagtagcacgtaataccggcttcacggtcacgtttagagaatttgtgtttaaagaatgttgtcgccagtgcgattccaagcggcggagccattccgcccgccatgatggccgcatgcggcgcatagtttccggcatcgatcatcgcgataccgaaagtgaacgccgctttattgagcgggccgcccatgtcgatagccatcataccgcctaaaataatacccattaagacaaggtttccagttccaaggctttcaagccaatttgttaagaaattcataaacgctgctacaggtgtgttaatgacaaactgcatcaggacaccggtgataaaaataccgagcagcggataaatcaatacaggttttaatccgtcaagagtctgaggaataaagacaaacagctttttcaaaaggactacgacataaccggctaagaatcccgcaatcagtccgcccaagaatccggcattcgcctgcgtagccataaatccgccgaccatacccggcgcaaatcccggacggtccgcaatactcattgcgatgaatccggcaagtactgcaacaatcagctttaacgcattaccgtcaccgataaagttcagcgctgcagcaaacgtgttgtatgtcgggtctttcggatcagctgaatgaattccccagaagaatgaaatcgcaacgagaattccgccgccgacgacaaatggcagcatgttgctgacaccgctcattaagtgtttatagaaagtacttccgatgcttgtgcctgatttctgtttcggaccgtcttcatttgaagcggaagatcctccgccgctgccctcgtaaatcggcgcatcttggttaacggctttttcaatcagttcctgtggacgtctgataccggccgtcacaggcacttgaagaacatgtttgcctttaaagcgctccatttcaacctgtttatcagccgccacgataatcgcaggcgcgtcttcaatttcttgagccgtcagcttatgtttaataccgcttgagccgtttgtctcgactttaatgtcaacgccgagctctttcgctttttctttcagtgcgtcagctgccatgaacgtatgagcgatacctgtcgggcatgccgtaaccgcaaggattttcccttttcctgacggcgctgcctgttcttcctgctcttcttcttcctcatcgtcatctttgtcatgctgattgatgatgtcaatgatcgcatcttctgattcagcttcaagaagctgtttgcggatttcctcacgcataagaagcgttgaaagtcttgataatgcctcaaggtgcgtattgttcgctccttcggttgccgcaatcataaagaccaagtgtgccggctgaccgtctaatgattcataatccacaccatcttttgaacggccgaatgcaatggccgggttaatgacgctcgccgtcttcgcgtgaggaatggcaataccttcgccgattcccgtcgagctttggctttcacgatttaaaatggctgctttgtaagcctctctgtcatttaatctgccggctttgtcaagcactgtcaccatttcatcgataacgttttctttctctttgctttctatattgagatgaattgtatctcttgttaacagctcagttatcttcacttttctttcctcctctatagacgtgtgactttaacttcaggaagaagctgctgtacaaactcttcagttccgagttcttcagaaaatgccgtcgcgcttccggaagcaactcctaaacggaacgcatcttccaaaggcagctgttttgaaattcccgcaaggaatcccgcgacgacggaatcacctgcgcctaccgaattgacaagctttcctttaggaacattggcgaggaaaaccgcctctttcgtaaataaaagcgcaccgtcgccagccatcgaaacaatcgcgtgttcagcgccttgttcaattaattttttaccgtaaggaacggcagcttcggctgaatcaatgaccgtattgaacatttccccaagctcatgatgattcggcttcatcaaaaacggtttcatttctgtcgctttcatcagcgcttcaccggagatgtccaccactacccgggcattctgctttctgcatgcctcagcaattttttcatacgtgttatgcggcagggaagaagggatgcttcccgctaaaacgacgatgtctccctcttccagagcggagaactgttctaaaaaggcattgaacacttcgtctgaaatcgtcgggccctgtccgttaatttccgtttcatcgcccgttttcagttttacatttatacgcgtgtcttcatccacctcagaaaaagccgtttccagaccttcctgctgcaaaaatgacgtgatataatttccggtaaatccgccgacaaaccccaatgcttttgacggcacatggtgtcttttcagtaatctcgaaacgttgatgccttttccgccgggatacttcgtgtcatagctggaacggtttaaaccgcctacggcaaaatcttcaacgtgaacgatatagtcaacagacggattgagagttacagtgtaaatcatggtttcactacctttacgacagttttttcttggtaatcatcgaatgcaagttcttcagcttcagtggtaatgatagctgcatcgcccaaggcggcgaacgctgcgaaagaaatctcgccgaatttagaaggatcggctaaaacatacgcatttttcgcctgtctcacagcctttgtcttcagaagagcctcatccggatcgggtgttgtaaagccggcttcaatgtgcacgccgttcaccccgagaaagcttttgtcaaaacggtactggctgaccgccgttaatgaggcgccgccgatcatcgcacctgttctatgcttcacatatcctccgagaagataaaaaggaatccccttccttattaaagcatcgatatgcataaccccgtttgtgacaaccacaatgtcctttgtatgatctataaaatcaatcatgtgcaatgtagttgttcccgcatcaaggtaaatacagtcaccttcttctaataaagatgccgcttcttcagcgatcttcagtttatcctgaaggtttttggaggatttttcaagcatatcgggttcttgcctgctgttggaaagtttagacgccccgccgtgaacgcgctttaaaaatccgcgctcttcaagtgttgataaatctcttctgatcgttgattcagaagcgtttgtcatgcttatcagctcttgaatcttcaccacatctcgcttttcaatctgatccataatcagctgatacctttcaggagtgagcatattccgcctcctttgaaaacgtattcatttcggctgcaagataattgtaaacgctttttttacttcaagcaactaaaatcactcaaattcattcaataactatcaaaatctttcacatttgttcatattaacgtatgtacatagggtttgtaaactgtaaattcgacaaaaagggggacaattgtatgacattttctttttatcataaatgaaaaaagtctattatattcattcaatcattaaaacacaaaaaaccccatgcagactgcatggggcgccggttattcataccgtaacgcttcaatcggatctaagcgtgatgctttgttggcgggcagcatgccgaagatgacgccaatcagcatactgaacagcacgccgatacaaaccacctgccaggaaacgagcgacggccagcctgcgataagggaaacgagtgttgctcccccgtagccgagaccgattccgattaagccgccgattaaagtaagcacaacagattcaattaagaattgtgtcagaatctgtcctctcgtggcaccgagcgatttgcggatgccgatttctcttgtccgttccgtcactgatacgagcataatattcatgaccccgatcccgccgacaacgagagaaataccggcgatcgaaccgatgatcgtcgtcataacggtcgtgacctgaccgattcccgccgcgatttcttccatattcatgacttgataggcctcttttgtaccgtgattgtcatttaagagacgggccgcttcttttcctgttgttttgatttgatcagcggactccgtctgaacggaaacgttgctgtagtcgttagtaccgaaagacgttttcagcatgttgaacggcacatacatttcactgagtcctaacgataaaaagccgctctcttctttcagtacgccgattacttctacgggctgtccgccggcccagacgattttcccgagcggagacgttttcccgaacagcttttcagccatttttttcgagatgattcccgctcttttcccggaaagaaaatcattgtccgtaaacgtccgtccatcttgaacgtccagcttttttacgtccaagtagccgctgttaatgccgttcagcgtaatatccgtgtcttcttcatggtaacgggccgtcatggattttaccgcggaagcgacaacctgctttacgccgtccactccttttaatccattaatatcttcttctgtaaaactcgcttgctgtaaggcgttcggattggctgttaattcttcatcactgggcatgtaaaacaattcaatcgtattgcccggcccgctgatggattgcttcagcatttgctctccgccctggccgacagccacaacaacgattactgaaccgacgccgataatgattccgagcattgtcagaatcgatctcagcttgtgagctcttacggaactgagggccatccggagattttctgacaggctcattcccccactctcctctgctcagaatcgcgggaaacgatcatgccgtcacggacgaaaatcactctgtttgtacagtccgccacttcaggctcatgagtgacaagaaccacggtcacgccctctgcattaagctctgtgaactgctccataatggaaatgcttgttttcgtatccagcgcgccggtcggttcatcagctaaaatgagcttcggttcgttcacgatggctcttgcaatcgcgacacgctgcttctggccgccggacagctcattcggcatgtgacgcatccgatccgccaaaccgactttttccagcgcgtgctcagcccgttcctcacgctcttttttgccgataccggcgtagatcatgggaagttcgacattttttcttgcattcaatcgcggcagcagctgaaactgctgaaagacaaaaccgattgatttgttccggaccgccgcaagctctttttcggtgcatgaagaaacatcttcgcccgcaagactgtaattgccggacgtcggtctgtccagacagccgatgatattcatgatcgtagattttcccgatcccgagggtcccataattgacacatattctccttcttcaatcgtcaggtcgattgaacggagaacatcaaacgtctccttgccgatctgatagctttttttcacctttgaaagctgaatcatctatgctttcacatccgttccgtcagtcaaaccgtcagccggattcagaatgactttatcatcctttgaaagcccctcttttatctccgtaagctgatttgcggtatcgccgactttaactttcacgcgtttggccttcccgtcttttaccgtaaagacccagtgctcatctccgtcttttttgactgcggaggacggcagcgtgtcggctttccgtttgtcggtttcaatgttcataattaatttaaatcccggcttgccttccggaaggtttccgatcagcttaacctgaaacggatactggacggcttgttccgtgctttcccccgaagcagcgcttgacttttgatccggaacgaggccgacagccgccactctccctttccacgttttaccggggatggcgtctgaggtgattgtaacgctttggccctttttcactttcagcgtgtcgtattcggacaaattgccggcaacgaccaggtgttccgggtctcctatatgtataaccggttcttgaatatccgattttttagaagccgcttcttgatttaccgagataaccgtcccgtccatctcactcttaacattgagattcgacacttgattttcaagagactgcttttgcaaatcagattgctttaattcgatttccgccgttttttgctgaagctgcagatcagtccgttcggattcaatttgttttttggcttccgcttctcccacttgttttgccagatcttgttccttgctgtttaatgctctgagtttttcttcaacttgttcgatttgcatccgttttgattgttctgtcaactcattttgttctttatcaaggttgagctgctcatttgtatacgtgactaacgacgaccctttttttactttgtcgccttcttttactttcactttatcaagagttcctttatctgcttcataaaaaacatactgttctttagaaaatttaagtgttcccggaaccataaccgtagatgagatttctctgttttccatggttccggtttcgattttttttccggcgctgccgcccgcgggagcggcagacttataaatattgataccgataaatactgcaacaattacggcgatgccgattccgatccaaatttttttcatgttatacacctgctgtcactgaacttaacagtcctccgactgccgaaaccaaaagcataataacaaacaggacaatcgcggaagtccaggccgcttttttcgaaatgccgcctgtatagcgaagtcccaaagccagcagaatatagctccagatgctgaaaatgtcgaacgcgcttaaaaagaccgcgacgccgtctccggccggtatgacactcgccaaagatgtaacggcgtacaatgagcccgcaccggtaaaataagtgacaagaccgttaataactaagccgatattggtaataaacgccgtaaacaggctgagtgagagcatttttttgtaagttgtcacgccgcctgacattttgacgcacagccagtaaatgagcggaacgataaacagagcgataatgcccccgaagattcctccgaacatcgtgccgaatttagcgaaggttttggtcatttcaatctgatcatccgtcaaaccgtcaagagatgagctgttcagcacttcttcataattcatccccagtccgcgcaaaatactgccggccgcgatgagaatgatgacaatcaggagaggtatgccgatgaccggcttttcttttaatcttttaaactgcacaacaggacttgtaatgacgccgaaaattgacggcttttccgtgactgccgcattgcttttttccaggtttggttccatatagctgatgcctcctatgtattattctgtttatacgtacgctttaggctgagagaagtttcaatttttttgccgtttgcgtatttatgctaaattgtaacacaaattctcagctttacgttccataattatgtaaaaaaaagcatcgtcagaccggtatgacgggtaactcaaaaccttgtaaaggcactgttatcagcctattcatgcagtgaaaaccgcctcaattgcaaaaccctttaaatcccatttagatattctctgaaattcagcgcctataaacaaaaaagccggatggcaatgatgcacatccggctcttttttcaccctccgcttacaggagggataaaggcaatggtatcaccttctgttacggtgctgttgtcttttacatatgtttcattgattgcgatcatggcattgtcaatcgtctgaaggccgtaccgttcctttaacagcgtttttacagcagacgctgccgtctctttttcgtcaagttcaatgaccggtgttcccgcctgctccgcaagcccggcaaataataatactttaatcatcgcgattcccctttatccaaatccggttttccgttcggatagggcgttgtttccagctgatcgcctatccattcttccccgtcttcccagatttcttttttccatatcggcacaatctgttttatccgttcaattgcatattcattcgcctcatatgccgcctttctgtgcggagaagacacagcgattacgaccgctgcttcaccgatatcaaggacgccgacacggtgagtgattgcagcttcggctccttcccatttcgcgctgatttcactgccgatttgagaaagcatttgaacagccatcggttcatacgcttcatattcgagacgcaccgtccgccgtcctgcagtccactctctgaccgtgccgataaacgttgtgatggccccggcttcacgcttttcaactttttttacgatattttccgcaatgataggttcccttgtaatttgaaaacgttccatttaagcagtttcccctttcagctgcgaaagcacaaacataatggcagcaggatcgtccgcatggaatacgggcttgcccgcatctgccggcatatgctccgtatttctgctgacaaccgcgatcacgcgctccaaatgcttcagcttttgccaatcttcgctgtttttgatcataatgattttcggatgcggcgcatgtttaaatccctctatgagaagaccgtcaattcccagacattcatacagactgatcaaacccgccagatcccatttttttcgcgccgtaagctgcaggacgccgtccccttctactgccgtaaccgcggctccggcttttgaaaaacgctccgagtcttttccgtcagaaaaaggttccggttctccgccatgtccgtgatgttttaaacatccaatatcgcactctttcggcgcagctttcagcacacgttcaataaacgttgttttaccgctgttttgaaaacctacgatctggacgatcgggaaagaattgaccacggccattcacttccattctcatcacggatgaggagcgcgtgaaccgtccggcccgcttcataccccctcgttcctcccggcagaaggataaacgcgtttgcttcggcaagagatgtgactgagcttgatttgtcgagaccgaccggtgacgccatcatttttccgtccttatgataaacaaatgccctcacaaatctcgtaaacggattcggcttcggaaagtcgtttgttaacacggcttccgcccatccggaatgaggtttttcattcagaagccatgtctgaatcatcggtttgacaaacagggtgaatccgacataacatgcggacggattgcctgaaaggccgaacagcagcatgtcatcggcccgggcgacagttgtcacgctccccgggcgcattgccactttgttaaaaagaacttccgctccgagcttattataaatgtccggaagaaaatcaaaatcgccgactgacacgccgccggtcgtgatcagaaaatcaacttttttcatagcttccttcaccgcagcatagctgtcatcaaaatcatcggaaattttccctaagttcagcggtactgcacccgcttcaatgacctgggcatacaccatggcagcgttgctgttgcggattttccccggctcaagcggatcgctgacatgaagaagctcggttcccgttgcgataatgccgacaaccggctttctgaccacgggaacggaagcatagccgaaggttgctaaaagagcggttacgcccggcgtgattttcgtccctttttttaatagcgagctgccttttttcgcatcttctccttgatatgaaatattatcgcccgcatgaaaagggcgtttcactgacatgtaattcgtgccgttttcagaaaacgtttttgtcagctcaagcatcactacagcatccgcgcctttgggaatctgcgcccccgtcataatgcggaccgcttcataaggcccgagttctttttctgacacggcgccggctccgatatggtcaatgacttcaaaggtgacggcattgtcacgggaagccgtttttgaatcgctcgccctgatggcaaacccgtcatacggagaacggttaaaagccggcacatcatgatccgccttaacatcctccgccaaatagcggtggagactgtcctcaagcgccacccattcggtatcccccttttttttataccggctcacccggcggactgcttcgtccacctgaatcggcgttcttttttcaagcatagcaatacatccccttcctacagtccgatcactctggccagaactgaattcgcttcttttatatcgtttgtaccgtgaatcagagcccgtccgtcctgaaaaataacgattctgaagcgctcgtacgccatgtgcagcaaaaattcatttgcttccactttaccgatctgcttcagacgtttgacaagctcttctttatccagcctctttaaggcttccgatctgatttgaacggtgtctcttccgcacagcacgcttgctttcggcctgttttcaggctgcagatacggatatacgggctccgcgccgcaggaagggcaatgatcccgtttgatctgatccacatttatgctcatattggtgttattccacacgtcaaacgtgaaaaagcgccgatttaccgccgcatgatttcctgtcagcaatttcagcgcctcagcctgctgataggcggagacgatatgaaccgccggaggtatgatgcctgctgtatcacatgtcgctccgcccacgggcatttgctcaaacaggcaggataaacacggcgtaacccccggaataatcgtcatgcacattccctgactgctgacacaggcaccgtaaatccaaggtgttttcgttttcagcgccagatcattgatgaccattctcgtttcaaaattatctgtcgcatccacaatgcaatccgcttgttcgatcagcggttcgagcgtttccgccgtaccttccgccgcgtaagcatcgatatgtatattactgtttaccgctaaaagacgcgccttggccgccattgctttcggcaggcgctgtctcgcgtcttcttctgtatacagctgctgtctttgtaaattgctccattccacataatcccggtcaataatcgccatacggcccgctccggctcttgcaaggccctctgccgcggctgttccgagggctccggctccgacaatcaggacactgctgtcagccagcgcctgctgccctttttcccctatcggcttaaatcttgtctgccgtgaatagcgctcttccatctgtgttgtccccttgcatttttatttccatcataccatgtttcttaccgatcagtcctgatttgaagactcgacatgcgccaaaagtctggtgtaatcgtcccgtgtgttgatattagcgaactcctccggcccggcgccgatgtcttcagcctgcacataacagacagacagccgtttcagcgtgtctgtcattttcagtttgttttgtgtcagctgatcaaaaagcacatcctgcacccgtttatggtaaaccgccaagaggggctgctctctgttttcacaaaccggtatgacagcgtccagatttcccgtcagcttcatttcaagcgcagccatcgtttttcttgtcacgagcggcgtgtcacaggatatgaccgtatatgtttcgccttccgtttgtttcattgccgtatatatgccggcaagcgggcccattccccgaaaccgcggctcatcggcaaaaacatgccgctccctgtttgataagaacttttttatatgctcagggcggctgataattaccgtttctccgccgccgaaggcttttttcgcctgttcataaaacatgccgcccttccactttgcaaaagctttcggttctccgaatcttcgggaagctccccccgctaatattacattcacccgtttcatgtcatcgctctcccattctatataaaagcatagcaaacgcctcagccgaaatacaatattacggtgcttgtctgtttaattaagaggaatagccgttgttcctttcccatattgtagtgttaacatcaagagggagatggttcttatgaaaatatcaggtccgtttttccacgacacttctcaagagaacctttacttgaaatccgaactttccagatgcagaaaaataatttcggaatttgaagcaagctacttccatcaaaaaaacaataagcttcaggaggaaaacgccaatattaaagagcggcttcacaagctttctgacgaattggaagccatggcgcaaaaacacaaacagactagtgacacggaacgttctttgcatgaaatcagggccgggctgctcgataaaatcgtcattctgcaagaactgcttcagcaggaaacgtttcggcggaaaaatgagatggaagaaaaacatcggctgcatcttacaaatgtaaaatttgaagaagaaaataaaaacttacatacccgcatccgctcacttgagaccgccgttcaaaccgaacggacttctcacgaagatatgaaacagcgttatcatgccgctgcagacgaaaatacccggctccaaacacaaatgatagaaaaagaataccagctcaaacatattaaaatagaaattaatcatatgagagatcgaatactagaaacaaaagaacggcttgtagaaatagaaaaaacgaaagaaaagttatttcaagaaaccattctttcatataaacggcagcttgacgaaagcgatgcttggattgccggccattttgctgatattgacagccgcacggcggaaccggcggaacaaactctggaaatcccttccgtttccaaagagactgttcaggcagaagacttgcttacagccgttaccgaacaagtcatctcccttcaaaaacaatttgtagaatcagagtcccgcgatcagtcgtttgatgaaaaactggatgcgttgaaagaacgagctgacggcgaaaagcctttccaaaaatatgttgtcaagcttgaaaaaaagcctggaaaagatgcgtcacttccgcagaataaacgggaaaacgcaaaaaaactgcttgagtaacgcaagcagtttttactgttttattcagcagccgtatcatttgccgtttctgctgtttcctgagaaatttctccctcaagaatatattggccgcgatatggttttttcacttccggatacattttaattaagctttgcataaatgttgtcatattaggaatttcaaggccgctttccttttcaatttccttttgcagttcggaacttttgatcgctgcattgtggcgtttcaatgttttaatcgctgcttcgcgcagttttgccgcttttgatcccggtctcgccgtccctcttcttcttcttgtagaaccgtctggaatgccggcgggaagagacgtaatagactgcatctgcggctgggaggattgcggctgtgtctgcggcttttgatagcttctcatttcctgtgctgcaagctctgcaagcaccgggagagagtcactttttttctccggacgaaactctttttttgtatcggacaggctgcccgtattgtctaattctctcagttttgcatatattttatcacgttctatttgatattcacgaatgacttttacctctgcttcgttcaattgttctaaacgtaagcgcagcgcttctctttcattaaacatgtgtaaaaccccctgtcaaaaatttaaacgcttttattaagatattagattacaaaagtaattttatcaactattattttatcattttactattttatttactctatgaaaaattgcttattttctgaaaatggtactttatatacaaaaatcccttatcatataggggattctggacaaagttccaatttattgaaccatttcaaaatataacttgaaattacttgtttaatgaaaattagcgtgatatctacaattttcgactataatatgtaaaagttaatgatatggataaaacaagcggtacagcgtgtttacggctgtttctcttattttttaagccatacatgccatattggaattttttatccaatagccacaaaaaaaccctgttacctaacggcaaagggtttgcagaaccgagacaatagtccggcggagattgtcccgattactcagaagcctgctccgtttctgaaagtacccggctgatgcgtttttcaagcattttcatcccgctctctcccgcttgaaaatggcggagctgtccgcttttatcaaaaacgtaataagccggcacatattcattttcaaatgcgtcagccagcgtatgatcgctgtcaacgtaaatcggctgagagatatcgtgttcagccgctgttttcttgattttctcaagatcaagatcgtcttcggaacggggcatgtggacggccaccacattcagctgatctttatatttatcacgaaacccgttcacctcaggcatcgcttctttacacatgcggcagctggcggaccagaagtgaatcagtgccggctttccgccgaccagctgttccttcgtaacttctctgttaatccatgctttagcgcctgttaattcaggcatttgctgatgtaatttcatcttatttccctccttatgaaaaaagttttttgccggggctttcagtccgcctggcaacgttctcctgttttccctccaaaggaaatgatttggctgaatcaccatgttaaaatgagtgtggcgattccttagttcatatcttcacaaaaatgaagatattgaaaccgggcaatatgaacaaatcataaatgtaataactggtttctatgaaaaggtttatcttatttaaaaaacgggtatatcacttttagctttttcctcaatagacttgaaaggaagacatcactatgattgatttaaaacactttgattgggccgggcttctcacatctgccgggattttcatcataaagctggctctcattattttagcgtattttattttccggacggcaggaaaaaagctgatcaagcatctgtttcagaaattcgagcaacaaaacaacctctccacaggccgcgcttatactttgcgaagcctcgcgcttaatgtgtatggatacatcctgattttcgtttttatcgtaatgattttggatttatttcactacaatccgagcgctctcattgccggcgccggcgtggtcggtctcgccgtcggcttcggggctcaggggcttgtcagtgacatcgtcaccggattttttatccttttggaaaaacagatcgacgtcggtgattatattacggttgccggctacagcggcattgtcgagcaggtcggtctccgtacgacgcaaatccgtagctttgacggcacgcttcactatctccccaaccggggcattacgaatgtgagcaaccattcccgcggaacgatgcaggcgcttgtcgatattaaagtgccgcttgaaaaaaatcttgatgaaaccattcaaatcctgcaaaccgcgtgtgacaaagcagccgctgagctcccgcagattaaggaagggccggacgtcatcggggttcaggatttaagcacgtcagaaatggtgatcagaatcattgccaaaacagaaaatatggagcaatggcgggttgaacgcgtactgcggagagaaatgaaaatcgcgctcgaccgttttaaaaacgccgcttccgccgaatagaaaaaccgaagcgtaagcttcggttttttctttttaatgaaattttttttccacttcgctgcagatttcgtcggcggtcattccggaagccgtaatgacgggagcctgagttgacgtatcggcaatgccttggacattgctgtcaagtccggttacgacacagcagtcacaattcttcgcatcctcaggagtcttcatcatcactacgtcatatcctttttgttttaacgcctgttctacatccgataaagattgttcaattccaatttttttcgtcatattgaacacctccgttatgtagaatgctcaatttttgttagattattcttcttttcggatttaattggcatacttcgaaaaatatccgaccatgacatttaccgcggtttccatcgcatcttcatccgggttcagcttggcgtgatgaagcccgtgggatgaatcggcccccagccagaacataaagccgggatattttttcagcatatatccgaaatcttctccggtcatcgcttctttcgccgttttcacgtcagcaagctgatgatcgctgacaaattgcataaattcttcggtcaggccgcttgtattataaacttgatgataaacggacggatacgtgacttttcctttgcatcggaagccgatttcaattcctttgacaagctcttcaatccgctttttcaccatacgcattgattcctcggaaagcgtccggatggttccctccagatgagcatgctctgcgatgatattttgcgccgtgcccccggtaatcgttccgacagttatcacagcgctgtcaagcggatccgtatttctggatatgaccgtttgcagctgcgtgacaagcgtgctcgcggcaacgaccatgtcatctgctgtatgcggatatgccgcatgtccgcctttcccctcaagatcgatgacgagctcgctcgtattggcaaacagcaatccgcttttggtggaaatggtgccgaccggcagctctggtgctatatgtagggcggtgattaaatccggcgtccattttttcagcacatcgctttcaagcatcggtgccgctccgcccggtccttcttcagccggctggaataaaaagagcagatcatgtttgacggggtgatggacaaaatgatcaataatgccgagcgcgatggtcatgtgcatatcgtgtccgcatgcgtgcataaaaccggggtgctcagatgcaaacggaagccccgtctgctcttcaatcgacagagcgtctatatccgctctgtaggcgagcattttttccggagccgtgcccttgattttgacaaagatgccggttctccaagtttcgatttcaattctttcttccggatattggtttaaaagattcagcaggtactgctgggttttatattcctgaaagccgatctccggaatgcggtgcagatctcttcggatggcaatgagccgctctttttccatatgtattcctccttgagataagaataaggcgtggattttatcatccacgcccattctatcaaaccattccttacagctggcgtaattcctgtttgatttctgttttgccttttgttttttcatcgatatctttgatttttttcgctggtgttcccgctacaacggtatatggctcgacgtcatttacaacaatggctccggcggcgacaaccgcgcctttaccgattgttacgccttcaagcacaaccgcatttgcgccgatcacaacgtcgtcttctacgacaacaggcttagcgctaggcggctcaataacgcccgctaatacagaacccgctccgatgtggcagtttttgccgacagtggcgcgtcctccgagaacaacgttcatatcaatcatcgtaccttcgccgatgactgaaccgatattaatagatgcacccatcatgataacggcattgtcgccgatctcgacttggtcgcggataatagcgcctggctcgattctcgctttcacatcttttaaatcaagcatcgggatcgcagagttgcggcggtcattctcaatgacgtaatcctcaattttgtctttgttttcttcgattgcgcttttaatttcagcccactcgccaaaaacgacgccggattggccattcaggaatgttttagcggaatcgccaaagctgattccttcgagatcgccttttacatacacttttacaggcgttgattttgtactattttgaataaatgaaataatttcatttgcatccatcattttcatatgtattgtcctcctctgattttctacctcattactgtaacaaaggaaggatacaaagacaagaaaaaaaggaacaagcctttattctgccggctggctgcacagcgcggcaaactgtcttccgaattcccggagctcttcttcctcactgccctcagggttgttttcaattttgaccggcggcagcaccacccgtccgccgcgggccgtgattactttttccaattcgtcaaccgctccgcaaaaaaactcataggacgtatctccggaaccgaacaaagcaaatgtttttcccgtaaactccagtttttccatatcttcagcaatatcgagcatttcatcaggaagatccccgtctccccacgtatatgtgcctaataaaatatactcgtaatcattaaaaagtccggcatgaatatccatcgcttcatatctgtctacggatgcttgtgcttcgatcagccctttttcaattaaatccgccatcgcctcggtgtttcctgacattgtagcgtaaacaagcaatacattccccatcttcgtctctcctttatgcataaaaactaatgtgcgagccgaaccgcctcatacggtctgacaaacttactttcgtaaaggcccgcgcaaaaaaaatcttcttcccggttggccacccgccatccgtgaccgcggatcgtatcaaaccactttaattcaccggcagcgagatcagcttgataaatacgcgaaaatccgctttcgtcctgtgacgaagtgacataaataatcccgttatcctcagacacgtcaagaaatgatttttcccgtacattgtccccggctgtaatggcaaactcctcatgcgtccgcacgtttcggacagcaagctccccccgttctccctttgccgcgccctttgctgcaatgagccagtcattctgatacatcatcattgaagccgtcatgcgctgcctttcgcggcttatacgccggatgcggccttccgtcgtcagatcatacgcccaaatgccgccatgattcatatgaatccgggtgccgatataaaccgtctgaccgtgtaaacaaagcgaacggatgacaggcggctcctttaattgtgaaaaaggcttagccacatgccaagtgacgccgaaatcatcagataagtagatgcagtatgtgccgtgcgcacagacaaatccgtcattccgcccggcaacggcccatacggaggcgctggtcggaaatcgggaggccgtccaagtctttccttgatcggccgatctgaggacggcgcctttttctccagccgcgaatatgtagggccctatataagtcagcacatgaatcctgctcttcactcggaatagtcttttccagccttcttccgccgaaaaatgaaaaataccttcgcctttcacagcgacaaaaaatcctgaagatactgatgccatgacagccgtcgcgcctttatgaaacatggcaccggtctccgtggtgagcggcccatgcaagaaaaccgcggacaaattctttgcagcattcttgatcttcagccgtctcgggcgccagctcaattttcagcgtttccggatataaattggctccggcctgttcaaacgcatcgcaaaacagcgtgaccgcttcgcaaaacttcgggtaggcgtgatcgcctgaaccgaaacaggccgttttcagtccgttgagctggctgtgcagaatatcttcgtaaaaatcttccgcttcgtaaggaagatcaccatccccccatgtgtatgtgccgacaaaaacataatcatatgctttgagagaatccgcatctgcttcgtccatatcaagacagtcaaccgctatctgatgcccgctcagtgtttcttttataatgccggcaatatcctctgtattccccgacatgcttgcgtatatcattaatgctttctgcatatgatcacctcgtaattgataatgattttcattaacatacataacactttaaatgataatgattttcattgtcaataaaaaataaaaaaaagacagcatgattgctgtctttctaaaatgggcgttcctgtttcagcatatctttaatgacagaaacaaaagcctgcacctgttttaattcaaatgccggctcataaccgagcagccatgtgtcacggccgatcggatggtcctttgtatcaagcaggggcattttatttactttatcttcctcttctaaggtgactgacggcagaatggcataaccgatcccgtgcagcgccatttgcttgcacgtttcaatctgatcgacaaggatggtctgtttcggcgaggttttgaatttttgatgccaccaatgctgaatttcctgaaaatatgtactgtcacttttgaattgaataaacggccggtcggtatgggcaatatcatcaatacaggaaatttccgtatcgaccaaatataaatgatcggtcattaaataatctttccggcctttccattccggatttccccggataatgccgatatgtacctgatcttcatacagacttttcagcatttcgctgctccagcctgtaatgagagagacctttgcattcggatatcgttccacatatgtttttaacactttcggaagccagtgctgcccgataatggaggcgacggcaagctttaatgtgccgtgaatctcaccctcaagttcatcaatgttttctctgattctttcttgccgatccgtgacgtcatttgcaaattgtatgattttttctcctgccggcgttaccgtaagtcctttttgagacctaagaaagatctttgttccccaggttttttcaatggtctgcaatcgctgggacagagccggctgtgacacgaataaccgttcggcagccttcctcatgtttaattcctcagctaaaactacgagcatatgaagctcttgaagctgcatgtcgtcctccttttcaatgccttttcgtattccttatctaccattctaatcaaataaaggctgccgaggcaagcgccactcgtatgtatgcgttttctttttctggcatgcgaaagaacaaataggctgatcgtgcgagcctacttattcaatgatctgatatgactgctcaactgctttaatacgactcttctcgtgaaaatgccttcaaagacgccttcatcattttcaacgcagacaaagccgttgttaatgaccatgctgaaccctttgataatcggatcattgatgtggagacggggaatgtctttcagcatgacttcctcaaccgtaatttgatccagcttctcaaactcgatccgttcaagtccgaaaatgctgttcataatcatatttgtcccgatcaaaccgtgcagacggtacgaagcgtcaaggacgggaatggcggtatagccggttttcgtcagcactaatagagcatgctcaaggttgtttccgacttgaacgtgcgccactttatccgcctcgatcataaattgtccgactgttgcatcaagaagctgatctgattgtaagctaatcatgtcacttcgacccctttacatttttcatcaaagcatgtattccctatattgcaataatataaacattatcattttttgtcgaaaagtttccgtcaataaaaaagatactctttgcaatcgagtatcaatttataggccgctgattaattttcgttccgaaaacggtcatagagcgttacgagttttttataagtggtcccatcaacgctttttgaccctgcttctatatcgttgatttcgctggtcaaaagctcaatggcatattcttgattgatcaggatattcagcagaagtttctgttcttcttccgtaaatcgttcactgataagactcatacgtaatcaggccccctatttttaactgaatacctctgaaagcaatgtgaaatttgctttcagctctaccgctagaataagtaaacagaaaaaaatcgtcaaccgcataattcgacattttgcggattctgtatgaaatattattttgtgtaacgattggcataactgaatgctgtgcaggaatcgggcttgattttcgcttcaatacccatcgaggtaatgcggccggtcatttcttgtatcaattcttttgtcagccctttttgaccgatatccagatgcacttcaaatgaaagatccgccccttcatccgcaaaaggcaagagcaaatctgtcagttccataagacagccgtcgaggatatgcgcagccatctcctggctgaacgcggtttccagcgagattttttcgcgaaggctatgtatcggtcttgcaaggtcgtgatttttcaaacagccccaagctcccttgcctgtacggtgcaagtgtatagccgtaataaactttgtgaagtcgcggtaaacttgtgaatcagtccctacagacagcacgtatgctgaacgggggtctttattgacaaagcgtttcagccgctccgtcacgtcttgaaaggtcatctgtgcctcagaaagattataaaacagaaaagaatcagccatgtacggacactcctctttccagagtctacaaccaaacgaacaagcacgttcctttgcataatttaataaagctccgcttgcggaagaccggaagcttggtcagcctgaaaaatcaaatcacattactgaaggagctcaaaaatttcaatagaaatcatgtcaatgttatcaaacggatatgtgttaggtttttcacctttttggaaaaccgtcagttcaaacgtttgatttttttcgaaatatttaacactgcaaattttttcgccgttaacttcaaaataacgctgcatcggctcgttagccgcttccgctgtttcttgcagactttgcagccgcgtgatgatacccattaattgtgacattctaaaaaaagactcctttcaaaaaacaacttcaaatcaacaagtatttattataatacaagtcctacagagcatcataccataaagtagaccgggatggcattttcccgctggattttcaaaaagaaataaacgggaaaaccgtgttttcgaatagtttgaagcttttttcggaatgtcatacacctttcaaaaataatttttcgctttttgagccgccattgtcagatgtatgtaaggagaagcccttttatgcgcagacagcataaaaaaacttggcgggggtagcgccaagctttttcggatcttgatctgatagaggggttggggaacagagagtaacttctctctataactaaatgataatgattatcactatcattgtcaatcgttttttaaaactttttcacatttataaaaaaaagcggcatactgcagccgctttaaagtaacccgtcctgttcatataaataagagtaaggcagatcgataaataaatacatattgtcatccatcgggtatgaaaaggttctgatcatctcacccgtctcaatatcactgtacaggtcactgaaaaagccttttcttgaattccgcatcttcataatgttttctaaaaagtacggacgccagctccagtttttctccacgtattcaggctgataaagccattcgccggactgcttgaacacatttcccgtcagctgatagccttcttcatcacacatataaattctgaaacagcagtcggtcaggttttccgccagttttttaataaactcatcgtccgcctgatgggttttcttcagttcggaaactgcctgattgacccgcttataaaaattctcagagtgttcgtatactgtctccagcttctttttttctctcgtgataaattgctgaaactccgttttcaagcgtgcttttaacaggctccggtctataaaatcgccgctcggcgcctgcagataataaccttgaaaaaatcggcctccgtttctccatgcgtactggagctgaaaatcagcttctatatcttcatacagcagcgcggcgccgatttttctcgccagcaatgaaatgctgtacagcacatgctcatacgaaggtgacggctgagatactttcagcgcctgcaaatctattttcagaaggtccggtgaaaggagcgcgattctgtccaggttgctgctctccttacctatattgtccaccgcgattttaatgccgtatgtacgatagtaggcaagcatatggtacagctgttcaatgtcgccttcgaaattgtgctcggtgatctcaagcacaatacggttcaattcaatgccctgctcttcgtattctttcaaaagctcaagaaagctctcgccgtggtcaagcatcaatacattcgcatcctgattgataaaaatcaacagatcgcgatcagcttctttaaaccgctccagcgcctgcctgatgactctgtcatcgacctcaagcttatattcttccgggatgccggaatctaagaaaaacggcccgaggctctcaatctccgcatctgccaaaatacggccaagcacttcgtagcctacgactctttgttcctcagcgttaaaaatcgcttggtaatacggaataacatcatcaatattcgtcagtatatcaagtgggtccaacatgttatcacctgcttctctatctttgtctgattatacacaattatatcagcaccacaaatgtttagattaggggaaaaaggaggcagtatggcagcagtttaaaataaaaggggaaaactttttaagatcactcttcagaccggttaattaaggacgttattcatttgtttcaccatcacaaataaaaggataaatataagagcatgataaccggcggctgtccaaaaataatggctccaatcagtactgttaaatatccaatcatcatcatgtttcaactgaaagaaagttccttttttatctaaagtgccaaatgtaagagttgttaacccgccagcactcttggaaacgtcaacttcatacattgaaccggcatgatcagtatgatttattggcatatacgtataatcagataaaattgtttccgccagcttggttggcagagacacatatcatacagccgatgtatcgcctccgagcccactcaaatactccctggctttaataaatttcgtttcatcaggaaaatctatatgatatagcttttcaaatctgattatttcatcagatgtaagattggtattttgataatactccggagtaaaagcgcaaatgataaagtaccaaatattaaagatgataacgaaactgcttacaaatagtacaacgaaccattttaataatttcttcacttattcacctcttaatctttaaaaattatatcataattttgaatagaaaaataaaacaagcgaacggtcacctttaacgttcgcttgttttgcaaaatatgtcatgtaaattaaaacgggtaaggattcagccattgccccccgtccattgtgatacaatccccgtttatataggatgcttcatcggatagcaaaaacgctgccaaagcggcgatttcctccggtgtccccagacggccgagcggcacactgttcatagtgcgggacaccgctttttccgattcaaacagcttctccgcaccgcctgtccgttcaatcgggccgggggctatcgcgtttgtgcggatgccgtatttgctcccccattcaacggccagcgttcttgtcagtgacaatacccccgctttggctgcagcggaatgaacgacacccgctcccgctccccatgcgtatgtagcggccatatttaagatgacgcccttctgctcctgctcgatccaatgccttgccgcggcttggctgcagaaaaatgtgccgtttaaaacaatctcaataacagctttccatccattgggcgtcagcttctctgccgggcaaataaaattgccggccgcattgttaatcagcgcatcgagccggccaaagacttttttcgcttctgtaatcatgtctgaagcggcggaatcagaacggacatccatttgaaaacaggcgacctgcccctcaaaggtctcaatttctttttttgtttcctcaagtgcttcatggttcctccctgtcaccatgacgtgccatcctaattcagcctgttttttcgccattgcttttcccatgccgcttgaaccgcctgtaatgattaccgctttcttatccataacaaacccaccccttttattgaatgaataatcattcataattttatcatagatgtctttccgcgtcattacatgctgagaagggatttttcagccaggctgatgatataatagaacaactctgacaaaggttggttttacatatggagaaaatgacgagaagaacatttttaaaaagaggattcggcattttgggtgcaactctcgcaacggcttgcggaggttacggctatgcccggtatattgaaccgcgcatgattgagatcacccgtcatacaatcaccagccgcctgatcccccgcggctttgacaattttaaaatcgttcaattcagcgatacgcatctcagtgatgtgtttacatccggtgacttgaataaagcagcggaaaagatcaatcagctgaaacccgatctgctcatctttacgggagatttaattgataagccgcatttatttaatgatcaccagcaagcactggccgtgctgcaaaatctggaagctcccttcggcaaactttgtgtttacggaaaccatgaccacggaggctacggtacgaacacgtacaaggctctgatggaagcggctgattttcaagtgcttcgaaatggctgccgtcaggtgcagctgacagacggaagccggattgaactcgcgtttttggatgatgtaatgctcggaaaacccgattatgaaggcaccctttcccgcctttccgaagatgcgttttccattttaatcgtccacgagcctgatgccgctctcaagatcggcggatatcccgtaaacctccagctgtcgggacacactcacggcggccaggtccagctcccgtttttcggccctctcattacgcctccatacggaaaaacgtataccgacggcatgtatacgctgcatgacacagccgtttacgtcaatcgcgggctcggtacgacaagactgccgtatcgatttttagccagaccggaaatcacgctgttcacattgaaaaccgtacaaaaataagacttttatcccgatgcacagacatcccctccgtaatatgtatatggaaaagagcaaaaaggagggtgacgaaactgctgacatatcaagtgaaacaaggagaaaccatctcaagcattgcgcaagacttcagaataagcactgctgctctccttcaggcaaatccctcaatccaatcggtcatatacgcgggacagcacattatcataccgaatcttcccgacccatccaccattccctattccattgtcgtgtatatcggagcgaagaaactggagttataccgcctcggcaggctcatccgtacgtaccccatcgcagtcggaaaaatattgacgaccacgccgaccggagaattttacattgtgaaccgccagcccaagcccggcggcccgttcggcgcttattggctcagcctctctaaaattcattacggcattcacggaacaaataacccttcctccatcggcaaagcggtatcaaaaggatgcatccggatgtataatcaggacgtcactgaacttgccgctaccgttcctaatggaacaagggtgaccattataagatagaaagatcttatttgttaatggaacgagctgatgataatatattacagtgggacctttagggtaaggagcgtgtttatggatatatttaaaaatcgcaattttgtccgtctctttttcgcagcactcgcttctcaaatgggaacgactgtaggtaatatggctttcgctttttacttgctggaccatttttcaaaccagccggcatacacaactttggctgagctgatgtattcactgccgacagttttcgtatttctgattgtcggtgtcgcagctgaccggcttgacaggaaaaaggtcgcagagaattgtgattggatcagagccggactgacgatcgtattatttgccgcattatacaccgggagcatccctctcgtgttctgtattttgttcatcagaagcgccgtgaccaagttctttttcccggcggaagccagccttgtacaagctattctgcctaaggagcattatgcgaaagcggcgggacttaaccagatcctgttcagcatctttatggtattcggcgtcggtatgggcgcgtttatgtataaaacgatcggtattcacggagccattatccttgattttgtcagctttattgtatcaggctttctgatccgcgcctgccgcattccgaaagaagcccgtcagccgaacggcccttttaaatggggagattcgtttctgaaagactcggtcgctgattttaaggaagggatcgtatatattgttaaaaacaaattgcttgcttcccttattttcggcttttttatctttggttttgtcaacggcggctttgccgtactgccgatgtttacgatgaaatacggacttgcgcctgatcattacgaatcacatacttccatcttcaccgtcgcactcggcttcggcctgcttgcaggaagtgtgatcggaacaatgatcgcaaaaaaagtcaaaccgcatcatttgatgtcgattcctattttggcagccggactgctcatttttgtcctcggctatacggataagctgtggatttattatgcggcggctttcatcctcggcatgtgcatcggccctgtcaatatcgccatcggcggctggatgccgaaaatcgttcatccgaaaataatgggccgggtcagcggctggcaggatccttttatgatgtttgcccaatcgattacactcggactggttgccctgttatttccgaaattcgtttccaatattgattacctttattacggcatgggaatcgtgattttagcggtatttgtgttctattttatcgctcttccgaaatacagcgccgaggcagcagaggtcgatgtgcagcaatcattaaaggctgattccgaaaaacatgcgaaacctgtctaataaaggaaaaaaatgcgcccttttcatcagaaaaaggcgtatttttataatcaatatttgcatttcaacgctaaaaaagtataatctatatatgaacttgatcaatgcaaaggagagaaataatggacgaccacgcttattcgaaagagctgcagccaaccatcgagaatctttcaaaagctgtttatactgtgaaccgccatgcaaaaaccgcccccaaccctaaatacctttatctgctgaaaaaacgggcattacaaaagcttgtgaaagaaggcaaagggaaaaaaatagggcttcacttttcaaataatcccaggtttagccaacagcagtcagacgtacttatctctatcggagactactattttcacatgcctccaacaaaagaagacttccagcatcttccgcatttaggtacgttaaatcaatcgtaccgcaatcctaaagcacaaatgtctttgacaaaagcgaaaaacgtattgcaaaaatatgtgggcttaaaggaaaaaccgcttgccgccaacaggcagcagcccgcttatcataaacccgtatttaaaaaacttggtgagagttatttttaattccgccgcaaaaaagccgatgcgtcatgcatcggcttttttctattcaatcacgtacgtatccacttttttaatgagctcgctgatttcaggcttgctgatctgttcatccgctccgactacttcgccccggtggcgcaggtcgtccgtaatgagggacgagaaaatcataatcggcacatcagagctttgcgggttatccttaaggagcttcgtcaaacgatgcccgtccattttcggcatctcaatgtcactgataatcatgtcaatatgatctgacaggtttgctccgttatccgtcagttccacgacgtaatcatacgcttcttttccgttttcaaatgtaacgatttcactgtaccccgcctcagtcagctcatccgtcaaaagacgcatcagaagcggcgaatcttcaacgatgatcagttttttacccgcccgtctttcatcaaatccttcctgatggacatgataagtctcaactccggatgccgattcaatatcgtaaatgatcttttcataatcaggcagaaagatcatcgtgtcttccagtttgatgattcccgttaaatgccgctccatgccctggttcagggaagtcggcttttcaatcgcctcccaggacaccctgtggatttgtgaaacggaaccgacgtgaaagacgattttccgcttgttgaattccgttacgatatatttatcgtcttttgctccttcggcatcaacgccgaaaaaggaatacagactgatgacgggaagaatttcgcctctcagcttaatcatcccttctacgtctttatgagactgaggcacagatgtgacatctaccggctgaatgatttcccggactttcatcacatttatgccaaatgtattgacgcctacttcaaatttgacgatttctaattcgtttgtgcctgaatccaataaaatatcgtattgttgtaaagacaattcaatccctcgctatccgcattcagtattgtactgtatatatcggctgtaaacggaaaaagtgaatgtattcgggccaactggccatgaactctttataaaaagatgcttttttctgatatcccattgactttttgacatcgagtggtaaaatagtcaaggatttttcaggaagaagggtgtaataaatgggtacagtagtcatattcgaccaagatcaaatgacggtgttagaagatatcagcaaaacggcttacctgcaaatgaaaaaagaggcgaaagagcgtcccgacaagcccgctccatacatcttatggcgggaagacgtcagctttgaatacgggtattaatgacattcgccacatatcacaatagatagatcatgatacaatgaagacaatcatttcagctggttgtcttatttttttctgaaaaaaggtatgttttcacatatcggacatatactcgggatagttcaataaaaagatgacaaatgctcagctagtggtaaaataggataaactcaatatatagtataaggtgatgaattatggaacatttgcttaatccgaatgtaaaagaaattgaaatttcaggaattcgcaaattctcaaatcttgtagctcagcacgataatgtcatttcgcttacgatcggccagccggatttcttcacgccgcaccatgtcaaagcggctgccaaaaaggcaatcgacgagaacgcaacggcatatactccgaacgcgggcggccttgagctgagacaggccgtacagctttatatgaagaaaaaagctgatttgaattatgaggctgaaactgaaatcattgtcacaaccggagcgagccaagcgattgacgcgtctttgcggacgattttatctccaggcgatgaagttattctccccggaccgatatatccgggctacgaaccgatcatccgcatgtcgggcgccgttccggttcatgtggatacgacgacacacggatttaagctgacggcgcggcttattgaagaatcgctgacaccaaaaacaaaatgcgtcattcttccttatccgtcaaatccgaccggtgtgacattgtctgaggaagagctgcaaaacatcgcagccgtcctgaagggcagaaatgtttttgtcctgtctgatgagatttacagcgaattaacctatgacagaccgcattattcgatcgcgtcttatttgagagaccagacgatcgtcatcaacggcctgtcaaaatcacacagcatgacgggctggagaatcggtttcattttcgcaccgaaagaaattgccaagcacatcttaaaagttcaccaatacagtgtgacatgcgcgtcttcaatctctcagaaagcggctcttgaagcggtgacaaacggtgttgatgatgcgcttattatgagagaacagtataaaaagcggcttgactatgtatatgaccgtcttgtttcaatggggcttgacgtcgtaaagccgtcaggcgcattttatatcttcccttccattaagtcattcggaatgtcatcgtttgattttagtatggctcttttagaggatgcaggtgtggctcttgtgcccggcagctcgttttcaaagttgggtgaagggtatgtgaggctgtcattcgcatattcactggatacattgagagaaggcttggaccggctggaagcatttattttaaaaacgagagaatccatgcagactatttaaacaacggcataacgccgttgttttttttattgtttcgggaatgtaatgtgaaaggccgtgcctctgtccggtttgctgtctacttggatggctccctggtggtttttaataaggttgaatgtgaccatcagccccaggccggttcctttttctttcgttgtcaaaaacggttcgcctattcgtttcagcacgttttccggtatcccgtcgccctcgtctttcaccgtcacattaacggaatactcatcttctgtcatgatgatgtgaaccgttcccccatccggcatcgactcaacggcatttttaatcagattgataaacacctgtttcagctgattttgatcaccgttaatatacatgctgtcatgttcgtaatccgttttgataaaaatccctttaagattcgcctgcgtctctaaaagagcggtcacttcacttataattttctttaagtttacacgctctttcacggcgttttgctgaggtttggcaagcattaaaagctcacttaaaattaattcgattctgctcagttcggaaaacacaatttcaaagtaatgttcgttttcctccatcgtcggcttcatgagctgtaaaaatcctttgatcgccgtcagcggattgcggatttcgtgagcgatccccgccgccagctgccctgcgatagacagcttttccgacttcagcattaattcctccgtctgcttccgctcagaaatgtcacgcagaatgacctgcacggccgtttctccgaaaaacgtcgtcggaatgcagaccatttccgtgtagatcagccggtttttaaaggtaaaccacgattgcttaatgatttctgactcggtctttcggttgataatattttggatccgctgtttcacgccgtcatgatcacagggatgaagctgatcatagacgtttttcccgattaaatcttcatatgtttcagcctcaaacagcgaaatgcccgattcattcatgaatacccacttatcattgtgaatcacggcgatcgtgtcaattgaattctgaatgaggagctgataacgctctctgcttttttgcagaatcgtttggaattttttccgtgaagaaatatcaatcagaagcagcaattccgcccgctgatttttatatgtcgtcggtgccgccttcacttctaaatgaacgggcgtgccgtcgagccttctccacgtctgttcgatcattccgacttccattcctttttgcatccgcacaattcggtttttcacaatgtcgtgatactcttcttcaataaactcataggagcgcctgccgattacctcgtctttgctttcggctcccagcatggcaagcatcgcgttgttggcgtaggcgattgtgccgttgatgctgacatataaaggattcggcagcatttcaacaagacgctcgaattcgccgtttccagccgcatcttccgactgttgttctgccttttgcttcttttgttcatacatataaggccggcggggcgtcttctcctcaagcaccttgattttgaggatgatttcccgatccgtcccctccatttgcggtgtgacaatttccacacccgcttcaagccatacgatggtatgatcttttttaataagacgaaaggtgcaaggcatcaaatgatgctcattatagaagtaactttcaaccaaaaattgatcttcttcatgcaggaacgttttgagaaatgacccgatcatctcttcctgagaataactgaagtacgatttacagtttgcggaaatatacataatacgcccgttagacgtcaaaacggcatgaagatcggttttcgattgaaactgtttgacatgctgagtatcctgttccacagaatccctcctttgcattatactcgcactgcaggctggacacggactgatataaaaagaaattccactagattgattcgctaaaaaatgagcattctccttctattcttattgtgaacgtcaattttcctgaatgaaagaaagggcgcacgagatgttcggccgccctttcatttgttattttttattgtatttcttttcaagttctttgtaagcgtcaattgctcccttagcaatgtttttgcttacatgatctttatcatttccaacagacggaacgacgacgctgaatgccactcttggatgctctgacggataatagccgacaaaggtcaggttatacgtgtacttcccccaccagtttttgttcgtgccgtaatagtgcgtctccgcggttcccgtttttccggaaacatcagcgccggaaccttggaatgttgaataagccgttccttgaggtgagcttgtgaccaatttcattcctttatgaacttggtcaaaatcgctcggactgttatttactttgttcaaaattttaatatcccgctgttcaatcgcttttccaatcttatttttgctgtccggttcatgaatgcttgtgacgatccgcggctggacgcgatacccgccgtttgcgatggctgaaatatattgagccatttgaagcggcgtatacgtatcaaactgtccgatcgcaaagtcaagcagcaatcccccgaccatttgcggatttgactgcatgcccgctgattcctgcggaagatcaatcccggtcttcacacccaaaccgaattgggcgtagtagttgcgcatttttttaatatcgtctaatccggcaggcagcgtgccgtacggcctgtaggtaatgccggcgatatgcatggccacatgaaacatatacacgtttgaacttctttgcagcgcggtcagctcagtaatggctcccatttgtgtccacgattgttttctcgttttgcctttaaatacaagcggtgcatcgacaaacgttttataatgcgggaggccgctttggtaacccgcgagaacagtcgctcctttaacagaagagcccatctcatattgggtcgtaaatgctccgatcgcaaaatcctgtgttttatttgtttcgagatcgatgcgtttccccgccattgagagaatatccccgttgttcgggtccatcatgacggcaaatcctctgtcaaccatatagttgcctgcggcgcggcttcttctcagctctttttcaatgactttttcgactttcgactgtaattccatatcgagcgagagttgcagatcgtagcctctgctgccttcatcgacgggcttttggctgacgacctcacctttgctgttttccacatactctactttttctttatgcgcgtttaaatagtcctcatactgatattcgatgtagctttttcccacccggtcattcagtgagtagcctcttgtgacatagtaatctttccgttcgcccaacaatccctgttccggtgtcgtcacaccgccgaacagagagtacagcgttttgtcgtatggatattttcgcgtccagtcattgatcacgtcaatgccggggagctctttcaggtgctcggatacgacggaaacttcttcatatgtcagatcgctttttggtttttgcttgttgttttcatgctcgtcaagcaatgaaccgctgtttccgtttccgttcagcttattcgggtccattgatttgacgacttgcggctgataggcgttgccgcttgaaaaacgcgtataaatcgccgcaatttgcagctcttttttatcttgtttgatcgcatcaatctcctgcttcggaacgcgttcaatctggcgtttgtacacttcttgggatttcaggctgttttctgaatccttcataagcttttccgccttcttcggatgtgccgcaagccagtaatcaatgatatttcgatccttcataaattcagtatcaatatgaatcagtgcggcgagattttttgccgttttcaatttgtcctttgccgaggtttttgaggtagaaacgtatacaatttcaggcacagcctggttatcaaccgccaccctgttccgcttgtcatacatttttccccgcggtgtcggataataggcggtttttgcatttgccttctccgcatcctggcggtgtttatccccttcgacaatctggacgatgccgagtttaaaaatcagtgccgtaaagagaagaaacacaatcaaaaaatagagattcattctcagcgctctgtaacgtttcgtttttttctttggttcgcgcgcgacttcagccactttctgttacacctctcaaatcattgaatatatttacataaacagattttaattgtaacatttttgtaaaagttgttacagcgaaaacgggtaaaaaaaactgtcaagatcaaattatcttaaaatatatctaacacttcaaataatttgaagagatgtaacggattttaaaaaataaatacagatcgtttttactgatataaagccatttttctgtgctcaattacaattatgacaaacgtttgttgtcaaaggaaatggctgcctgcattatgacaaaaaagctgtgataagatttttcatgtagaaaaaaacaacttctctgggaggctataaacttatgaaaaaagcatttctcttatctgccgccgcggcagtcagtttgattacattcggaggcattcagcaggcatctgcaaaagagctgtcatgccagcacgtcgttactgtgaaaaaaggaaacaccgtacagcatctgactcttcaagaggctgttgaaaaactacatatgaaaacgagcgtgaaaaagctgaacgttaaaaatgagaaagaactgactcagctgctgcaaaaacacgcaaagcattctgatatgacagttaaagacgttcaaaaagaaacaccggaaaaaacggccccgacagctgccgaaaaaccgaaagccgatcaaaaccagacggctgacaatgcaaagcagacagataatacaaacaacagcagcgagaaaactccttcatcagtcagtgcgtatgaaaagaaagtcgttgaattgacaaatgcagagagacaaaagcaaggcttaaaacctctgcagattgatgaaaaattaagcaaatcagctcacgcaaaatcacaagatatgaaagacaaaaactatttcgatcaccaaagtccgacttacggctcacctttcgatatgatgaagtctttcggaatcacttataaaactgccggtgaaaatatcgccaaagggcagacgactcctgaagccgtcgttaaagcttggatgaacagtgaaggccacagaaagaacatcatgaatcctgagttcactcaaatcggtgtgggttatgtagaatcaggaaacatctggacacagcaattcatcggaaaataaataaaaaaagattgcccggcgggcaatcttttttttatttcacccaaagcttataaatgctttgagttccgctgttttcttcaccttgcgcggaaagcttgtcgtacaatgatttggccagcgccaatccgggcatttcttctcccatgagctccgcttcttcaagggcaatgcccatgtctttaataaagtgtttcacgtaaaatccgggcgcaaaatcgcctttcagcatacggggagcgaggtttgacaatgaccagctgccagccgctccggttgtaatgcttttcagcacttgttccgggttcagaccggatttttccgcgtaagccatcgcttcagccactccgaccatccccgctgcaatcgcgatctgattgcacattttcgtatgctggccgctgccagccggcccttgatactgaatattttcccccataacggagaaaagcggcaggcatgcttcaaacgcttctttttctcctccggccataatggcaagcgttccgttcctcgcgccgatgtctccgccggaaacgggtgcatccagggcgtgaatggacttttctttggctttctccgctattttcttcgccagagatggttttgatgtcgtcatatcaatgacaaacgccccttcttttgcatgacggagaatgccgctttcaccgagatagatttcctcgacatcactcggatagccgaccatggtaataatgatgtctgctttttccgaaaggtctttgaccgtctcctgccagaccgctcccttattcagaacctcttccgctttgtgtttcgtacgcgtgtagactaaaacaggatagcccgcttctaaaatgtgcgatgccatactgtttcccatgacgcccaaaccgataaatcctaccgttttgttcactgcgctttcctcccctgatgcgattcatatatcactctttcatgtctatattaccatattataggctgatagagaccgcgtcacaaggtgaatttagaaatggcgctgatcagatcttcgcttgcgctctttaacatatcagtcgattgcttcactttttcaagcgtaacgagctgttcatcagtagaagcattcacttcttccgccgctgccgcagattcttgagaaatggcggagatgctttgaatcgcttcttgaatcgaggcttgttcttcactcattttttgaatgtcattgtaaatatgatctataccttgaacgagagactgcatttccgttgtaatcagattgagaacctcacccgtttcatgaatggcgctgttttgttcatcattcattctgcttgcctcaatcatcgcgtgtgacgcttcttttgtctcagattgaatcagacggaccgtctcactgatatggccggaagaaagagctgattgttcagcaagcttgcggacttcttccgcgacgacggcaaagccccgtccgctttctcccgctcttgcggcttctatgctcgcattcagcgccaagagattcgtctggtctgaaatagcggatattgccgtcacgacttcttctatgtttttcgtttgttcttccaggtcattcagcattgcctctacttttttcgtttctgaattggcttcgtttgacttcatcagcagctgcccgagcgcgtccaatcctttgtagctggcatcctctgaagattttgagagttgttttatgctgcctgcgcgatctgcgattccttttattttgactgagagattttctgatttttcgttgatcgtctcaacctctgacgcttgctctgtcgctccggcggcgacttcctctatcgcttttgcgatttgtccgctcgtttcatttgtttcttgtgaaatgacggttagctggtcagatgtatcagacacattttctgaggaggccttgacctgttcgaccatctctttcatattttcaaccatttggttaaagtcttttgttaactcgcctacttcatcttttgatttcgtctgggcgcggacggttaaatctcccgctgagactgaatttgtttttgcgatcagctgctgaatcggcccggttatcgtttttgcgaggaaatagctgagtccgatcgtaatcacaagggcgatcagtgacataaaaatgctcaccgtgttcattttgtcggctactcccatcagctgatctttttcaaactgcgttccgactttccaccctgtttcttttaccgtttggtagacgaccatgttcccctgcagctctttgatgccttctttgtccgcagtgatgtcttttaacgtctgatcttccgaaatattttttccctgttttgccggatgggccagaagagagccgttttcatccgccaaaaacgcaaatcctttatacggaaccttttgctcgttgaccatgctctgaatggaggacagcttcaaatctaagctcgccactccgacgacggttccgctgttttgaatggcttttgacgccgtcacgatcatgtctcccgtcactgcatctttataagggtcagtccagacaaccttatcgggtttttcagccgccatcttataccacgttcgatttgtcagatcatagtctttggcaaaatcggcctttggatatgtaaacatttgtttgtttgcggttccgacgtacgcaagcgcgacatatttgtcattctgtccgatctgttttaactcatcgttaaaaagccgcgcggtttctttcttcccatctgatagaaaagaccgggacaattcaccgtctgctaatctcattaatacggtctcatcatttttcagctgaagctcaatgttctgaccgagtgaattggtgacattctctgtcgtacgttttgcttcctccgtcatcatcggctttaatgtcaaatatgaagaaaccgttaaaaaaacaaccgttacaataagcattgccgatacaaacacagcaattttgatatgcatttttttaaacataaccatcccctcctgagagttatatcggtctttcggccaagaaaatgaataaatcttgaaataaatatcaaacatttccgtcatttgtcgcagcaaaaaaaagagccgtcatgccgacagctccgccttacgtaaaatattcgattttcgctttcggaaaataggtttcgatataagattcgagtgtttcccttaaggcatgttcttcgtctttttggtatatatatttgccgattccgtagcgtccccatttgtacctgcgcttttcttcatcaagctcaagctttgttttcggatagttcttctcaatcacccgtttggccggttttgtaaaacgatgctggatcagttcaaatgtgatgtcatgccgaacgtcttcatcaagcgccgcatccagtttctcaaacagctccttatagccttcctcccagccatcatgaatataaataggcgccacgatgaaaccgagcggatagcccgctttagcgactttgacggcggcttcgatccgtttgtcgagcggagaagttcccggttcaaagttttttatgacataatccgcattgatgctgaatctgaacctagtctttccgttatgttttgcatcaagcaaatgatcgacgtggtgaaatttagtcacgaatctgagctgccccaattcgctttgtccgaaatgttcaatggctctttttaatgtatgtgtcagatgatcgattccgacgatatcagacgtacaagaggcttcaaatcttgtaaattccggcgctcgttctttcatatactcatcagcctgatccagaatctcttctacattgacatatgtccggatgtaaggctttgaccccatcgtcgtctgcaggtagcaatagtggcaatgccccatacagcctgtcgcaaatggaatggcatattcggcggacggctttgaagaatcgaatttcagtgttttccggacgccgattaccaatgttgatttcgcgttccggtattgctgcaagtgatttttccccggaatattccggacttgattatgcgatgttgtttctctgatctcaagccccatattttcaaacttattcttcagctcttgtcctaacgggtattcgagcgctctcggttctatataaacaagctggggcacaaacggcttcagcatgaactgacactcccttttttcatattctcatgttgttactttccgtttaaaagagagtgaatatgcgttgtaaacatttcctttgatcaatgatatcggtcttcttcaaaaagctcgctgtaaagcgcttccgcttcctcatatgttgaaaagaccgcgtcatcttcggccagcggatgataggtttcgtataaaaacagagacagttctccctcatgatatgggtgatggacgatctccgcctctttaatatgggcaacattggcggcatgcggattgcggtaaatcacatagaccgtatcccccgctgcaaatgattttgtcataataatccctcctgttgaacgttattgttccccccttttttccgaatatgaaaaaaaccagacggcttataccgtctggctgttgtattacttattgaatgtttctttaacgaatgcgacaacctcttctgtcgtgctcatagacaagattgtttctttgaatgattcagcttcttttttagaaagcttgctgatctgcgttcttgccggaaggatggatgtagcgctcattgagaactcatctaagcctaagccgagaagaatcggaatcgcaatttcgtctcccgccatttctccgcacattccgacccatttgccctctttgtgagcggcttcaataacaagggtgatcagacggagaatcgccgggttgtatggctgatacagataagctacgcgctcgttcatgcggtcagcagccatcgtgtattggatcaagtcatttgttccgatactgaagaagtcaacttctgtagcaaactgatctgcgataacggctgtagacggaatctctaccatcataccgacttcaatatcgtcagaaaccgctacgccggcttcgacgagtttttctttttcttcgagaagaatcgctttcgcctgtttaaactcgtttactgtcgcaatcatcgggaacatgatttttaagtttccgtatgtacttgcacgaagcagcgcacgaagctgagttctgaagatttcttgctcttcaaggcaaaggcggatggctctgtagcctaagaacgggttcatttctttagggagctgcaggtaaggaagctctttgtcgccgccgatatccaatgtccgcacgacaactgattttccttccatacgctcaagaaccgttttataagcgtcaaactgctcgtcttccgtcggaagctggtcgcgtcccatgtaaaggaattccgtacggtaaagccctacagcttctcctccgttttcaagaacgccttttacatcgtcaggtgtgccgatgtttgcggcaagctctacatgatggccgtcttttgaaacagtcggttcattgacgagcttcgcccactcagctttttgcgccaggtaagcactgtgcttttcttcatatttctttaacgtttcactggaaggatcgatgatcacatcaccatcgatgccgtctacgattaccgtaacaccgttttcaattgtccctgtagccgcttttgtgccgacaacagccggaatttcaagcgaacgggccatgatcgcggagtgtgaagtgcgtccgccgatatcagttgtaaaaccttttacaaactggcggtttaattgcgccgtatcagacggtgtcaaatcttcagccacgataacaacctcttctgagatcatgctcgggttcggaatttccacgcccagcaggtgccccgtcacacgttttgttacgtcacggatatccgccgcacgctctttcatgtattcgttatccattgattcaaacatagtaacgaacatggaagctgtttctttcaaagcgaattcagcattgactgaatctgtgctgattttctcctttaccgggttcagcagctcaggatcactcagaactaaaaggtgcgcggagaaaatgtcagctttgtcttgtcccagttcttttaaagcatgctctttaattttttcaagctcttctttagaacgtacaatcgcttcatcaaaacggcttacttcagccgcagcatcagcaatgtttttcttttcaaccgttaagtccggctcttcaagccggtatgctttcgcaatcgcaattccggctgaagcgcctattccttttaattcttgcattactcgccgagtccttcgcttttcattgtttcttctaaagcgttaagagcatcgttttcgtcagcgcctgaagcggaaattgtgatttcagcgcctttagcgatacctagagacataacgcccatgattgacttaaggtttactgttttgccgttatattctaagtttacgtcagcatcgtatttgcttgcagtctgtacaagaactgtcgcaggacgagcgtggattccggaatctgctgttactttaaatgttttttgtgccatgattatcattctcctttaaattaaagctattttactacacaatattatatcatacagccgtacttgtcatctgacaagcacggcgtatttatatgcttattttccgattttcacaatatctttttgttcccgttttacggtaccttcggccgaaagggaaatcgcttcaccctcggcaagatttgtaaagacaatcggtgtcattaatgaaggaacatgaggtttaaccgcttcaagatcaacttcaagcagcttttgccccggttcaacccggtcaccctctgaaacaaaagaagtgaatccttcgcctttcaggctgactgtgtcgattccgaaatgaatcaggatctctcttccgccgtcagactgaagaccgatcgcatgttttgtcgggaaaacattcagcacttttccgcggacaggcgatacgacgattccttcttcaggaagaatcgcaaaaccgtcacccatcatttttcctgagaacacctggtcaggcacatcggtaatcggatggatttcgccggtgatcggagaagcgaacacttcttcaccctgctcgtttcggagcggatctgcgataacctcctcaacctgctggctgacttcttcttgtgcggatactttcggttcagggcgcggcgtgcgtccggcgataatatcctgcatctgtgtttttaaaccgtcagaacgcgggccgaaaatggcctgaatgttgtttccgacttcaagaacgcctgaggcgccaagctgtttcaaacgagtcttatccactttcttctggtcgttgaccgtaacgcggagtctcgtgatacaagcgtcaaggtgcttaatgttttcctggtcacccattgcctgcaggatttcataaggaaggtcgccggcttcgcctgaggcgcccgcaccttcatccgcagcctcttcttcacggcccggcgttttcagattgaactttctgatcgcaaaccggaaaccgaagtagtaaataacggctaatcctaggccgaccggaatgacaagccaccaagcggtccggttaggcagaattccgaacaggaagtagtcaatcagaccgcctgagaacgtcataccgatttttacatgcagcagctgcataaccataaaggaaagtcccgcgaatacgcagtgaatcgcaaacaggataggagccacaaataagaatgagaattcaagcggctcggtaattcccgttaagaaacttgtcagagcggcagaacccatgattccggctacaagttttttcttttcaggcttcgcttcatgatagattgcaagcgctgccgccggaagaccgaacatcataaacggatatttccccgtcataaatgttcccgccgtcagctgtacgccgtctttgatctgagccatgaaaatccgctgatctccgcggatgatgtctccggccgcatctttatagctgaaaaattcataccagaacggcgagtagaaaatgtgatgaagaccgaacggaatcaatgaccgctcaatcatcccgaaaataaaggccgccaaggttggattcgcttccacaagacccgtggagaaggaattcagaccgtgctggatcggaggccagatcactaacataataagtccgagaattaatgcggaaattgatgtgataatcgggacgaaccgcttacccgcaaagaatccgaggtactgcggaagttcaattttataaaacttgttgaacaataacgcggccaggaccccgacgataataccgccgaacacgccagtcgccaaagtgggtatccccagcatgttaatataggccggatggttttccgcaaaaaactttgcccgttcaattttgtcagacggaatactgccgttcgccataagcacggcgctcatggatacgttcatgaccaggtatccgataatggccgcaattccggcaacaccgtctccgttggcaagaccgatcgcaacccctactgcaaaaagaagcggcaggttgtcaaatacgatttggccggcgctttccatgacgttcgccacaagctgaacgttatcattgcttaagaaatgcatgacttgaatcatatctttgttctgcatggcattccctaacgcaagcaagatccccgcagccggtaaaatcgcaaccggaagcataagagcacggccgattttctggagaacgccgaataatgctttaaacataaaagatgtacctcctctgttagctagtgtgaccttacagcgaaaattcatgacaacgaattcactggcgcaagtcttcagtttaaccgtttacatttgcccttttacacaacaaaaaaggcatgagtaaaaagggtgtgcaaaataacgggatcgttcttcccgttttttaccctcaatcactcatgcctgatcgaatcagtgacacgtttttaaggtttcaactgaaattatgaaattttattggttaatcggtacaaatgaagcgtgagataaaccgcttccgcctcatgaactggttttttcagtatttgctgcaagatttttatcagtttccaagcagtattgtagcatagcgggtattcatttttcaataataacattaacttttctggttcttttgtctgctcttcccgattaatcctgtctatggtaaatctgatatgccggatcagccgcaaatagtggacgctttctttattcactttcatctggaaagagtcctcaatcacctgaacaaggcgggacatcagctgcgaatgctgattgacctctgaaaggggccgattcgtcagggcggaatggatatgcagagcgataaagccgatctctccttcaggaaggcagattcccgtcttttcattaatcatgccgacgacttcacgggcaatttggaattcttccggataaagcgtttcggtttccatgagaaacgggtttttaatgtcaaacccctgctgcagccgctttaccgcaaaggcgatatggtcagtcagcgcaatatggatatgctcatttaacggttggcttgtccgcttcttgatatgataaatgacgtcattggagatgtcgacaagtgtctcgtccacataaccgaggagctttttaaattgtttttgttctttttcatcctttaagatgaacatcttgtcataccctttatcttcaatgacatccgcttgtttttttccaaagccgatcccttttccgattaagacgacctcactgtatctatcatgtgttgcgatgagcacattgttatttaataccttttcaactgtaaaggaccccttcatgatcctcagctcctttgtcattcaatacctcatatcgtacaaaacgaacggaaagcgcgtcaattctttttttagacggttgatcgttcaataaggcggtaatcaagaactttccttcccggaggcccgccgctgatccggttctcaagcatgtgaaaagcctgctttcccatttctttcgtttgtatatctattgtggaaatacctaacatcttgctgatatcatgattgtcgatgctcaaaatcgcaagctcttccgggatgcgcgtcccgtttgccttggcttcaaggtaaagacctgcggatacttgatcattcgccgcaaacagcgcagtcggtttgtcatcccagctcttccatctatgaaaaagggctttcccgtcaagcagcgtcagcaccttttccacaaccagctcttccctgtaaggctgcccgatcttcttcagcgcctctttgtatgcggcgattcggacttgactgttttttcccttttttctggccaggcagatcgctattttccggtgtcccttttctatcagataatccagaccgtgccgaaatgcttcccgatgtggattactgatggaggaaagccctgccgcatcagtgtactggcagaggatgagcggttctttcacggcaagcaaatgctcatcaggaattgctttggagcagataatcaggccgtccacttggcgctcctgtaattgtgataaggcaaaacgttctttttgctgctcataatctgtctggtataaacaaagatgcacgcctgacgcttcggcagcctcggcaatacctgcaacaaggtctgcaaaatacggaaggttcaccgacggaagcacaacgccgatcatatcggaaaaacctttggataaatgaacagcatgaatgttgcgcgtgtatccgagcgattgcatcgcttttttcactctttctcttttgtccttacttacataaggatgatcgtttaaaactcttgataccgttgtaacggaaaccccggcagcgccggcaatgtctctgatcgtagccatggcgtcccccctttctttttttcccttgatctggaatgcgtttcatacagtaagctagaaacagatacatcctatccgtttgaaaggagaagaacagcgatggggattctttgcttaatcggtttgtgtctggccatactcggcggcagttaccttgccctgcggcccctgaatgaaaagcatgacatcaaaccatttcagcattttgatgattttttcatttaaaaggtgataaaaaaggacgctgcgttccagaaccgtccttttttatcacaaagctttctatttcagaatcgttaattctttcggatactgcgttaatgcttcggcgccgtcttttgtgacaaacacatcgtcttctatgcgcacgccgccgacatccggcacgtaaattcccggttctatcgtgtacaccatgccttctttgaggagtgtgtcgttcgcgctgctcattgatggatattcgtgaaccgaaatcccgagtccgtggccgaggcggtgcgggaaatagtctccgtatccggctttttcaataatgccgcgggcttttaaatcaagatcgccgattctgacgccgggtttacttaattgaagcgccgtctgttcagctttaagcaccgtttcgtaaatctcttcctgtttcgggctgattgattggtatgcgaatgttctcgtaatgtctgaacagtagccgtcaagaataacgcccagatcaaacagaacaaaatccccttttttcaaccggtctgcacccggattcccatggggctggcctgatttttccccgaacagcaccatcgttgaaaatgacatgccctgcacaccttttttcttcagctcaaactcaatctgcgcgagtacttcggtttcactcacaccctctttaagcgccgcgacaccgacttcaactccgtaatccgcgagttttgccgcttccctgagaatgctgatttccttctcatcttttacgagacggaattggttgagcgtttcttctgccgaaacaaatgccgcgcccccagaagcttgtttgagctgttctgagcgggaaagagagatcgaatccttttcaaccgcgatggaatcaagcggcacatttcgttttgtgagctcggctttgatcagctcccacggatcttcgtgatcgccgtagccgataataccatgctcccaaccggcgcttcgggcttgtccgtcttccattcccggacaaacgaaaaacggctcctgttcctgaaacaggaacaatcccattaaccgctcatgcggatccgtgtaaaaatcagttaaataaaatacgttttcctttgtatgtataaacgccgcatcatgtccttcttttttcagccaagatgaaacacgttctaatctgttcattttttgattttcctccttaccaaagtgactctttattcattctatcagttttccggcgtttatgctgtgaacgaacattaaaaaaacagccgcccgatgtgcggctgtcatgtttattttaataatctcagtccgttcagtataaccagaatcgtgctcccctcatggccgattacgccaaacggcagttccatcacctgcagaaagttagcgcagatcaaaaggcagatgaccgagagcgagaaaacaatattctgcttaataatccggttcattttccttgaaagtctgcacattttcacaagcttgtgaagatcatttttcataaggactaagtcagccgtttctagagccacgtccgtgcccccgcccatcgcaataccgacgtcagcggttttcagagcgggcgcgtcattaatgccgtctccgaccatggcgattgtgccgtacgtttctttcagcttcttcacttcttttgccttttggtccggcagacaatcggcaacaaccgtcgtcatgcccgcctctttcgcgatggcagccgcagtttcagactgatcgccggtgagcatggctgtttgaatgcccagtgattcaagctcagccatcacggctttggcttcaggccggatttgatcctttaaggcgaagcagcccgcaatccggtcttctttcttaacaaaaaccagtgtaaagcctttatcctttaattcttttcccgatgtctgcaaaaaagcatctgccgcatgttcacctgcaaatcccgcttttccgaccatccatttgacgccttctatttcagcctgaacaccgaatccggacgtctcgtcaatcgatagatggcctgcgggcgcggcgccccggctttcggcaaattcagctatcgcttttgcaagcgggtggcttgattgcttttctatcgcatataccgcctgcatgatctcatcttcactcacattttccgctgcttgaaatgccgcgactgccggctgtccctttgtgaccgtgccggttttgtcaaatgcgatcatccgtacgcttcccagctgctctaaaaacacacttcctttaaccaataatccgttgcgggccccatttgagataagggaaagcgcagcgggcataatagaagcaacaagcgcgcacggggaggcgaccaccataaacaccatcgcccggtaaaaggtttcactccagctccagcctaaagcgaaatgaggaacgaataaaagcacagccacggctaacagcacgcctttgacatagacactttcgaatcgctcaataaatgcctgagccggtgacacgctgttttgggctgattccaccagccggatgatttttctgaataaagactgttcatttgttttcgtcacacggaccgttaaggagccgtttccgtttaccgttcctgtaaacacagaatctcctgctgttttttccgccggcatcgcttcacccgtcagcgccgattcatcgaggctcgtcacgccagactcaataatcccgtctgccgctacgcgttcgcccggcttaatgacgatcatgtcaccgatcttaagttcagcagccggcacccgcttttcccgtccgtccgcaagcagggtcgcttcctccggttccagtttcatcaaggatgttaaatcacggctgcttttattcatcgtatatgtttcgagcgcgccgcttaacgaaaaaataaagataagaactgcgccttccgcccaataaccgatcagggcggagccgacagccgcaaatatcatcagcagttccacatttaacgccttcgtctcaatggtatcctcaattccctcttttgcttttgcaaatcccccgatcaggaaggcaaggatatacaaagtgacggacaggccttttgtttcggtaaaaaaccaggccgcaagaataaggacgccggatacgagcgccgcaatgagttctgcatgctggagccacctttttccggcccgctcttcttgtatcttctgctgttgtgaatgggtttgtgtcatcacttgttcattcattatgaattctcctctctaattgagaacgcaaatcatcttcaattccctgataaaagtaaaacagccgcctgacaggcagcattttcacagtgttatcgcagtgttttctttattatagcatgccggcggaagatttcaattataattgttttaatttctttatgataataattatcattagtgtttcttcagctgttcattatatgcaaaaaaggtgcgggaggaattcctcccgcacctttttatttctctgaccattcttttaattgtgaggcggtcatcggaccgacgatctttttttcgatttctcctttttcattcagcagaaatgacgtgggaatcgtcatgacatcgtattccttcataagctcgcctttcgtgtcaagaacaatcgggaatgtgagatggtgctgagtgacaaagttttgaacggtatttttatttcgctcggcattcatcaaatttaccgttacaaggcttacatcatcagactgatgctgttcaaaataggtttggaattgcggcagttcttttttgcacggcggacaccacgatgtccaaaaatgcaaaatcgttttctgccctttattcggaatcgatatttcgtctccttcaatcgtcttcatcagaaacacggcgggaactgcctgtttttctgatgaggcttttgcttcaggcatccaaacggcggcagctatcaaaaggactgcacatacaattagacggtttttatgcatatgatcttcctttcacgcgtttcggatagcttgcccttccttattgaaatgtatcagccttttcagctttcgatccggggagctgttcttccgccgcccgtcaaaaacacggagacaccgaggtctttgcagatcgtcacgtaatgtaaacttgtcagaagaatcatgccggtattcataccgagtataatgccgagcatttgcaattccggcatagaaccgagcacatacatcattgaaagacctacaatgctgctccatacgttatgataaaacgccgttttcacgtggccgatgccgatcagacaggcttgaagcggcatcacaaacagatgaaaaagaaaaaacggccacaaaagctgcaaataatactgcgcttccggagactgaaaaaacaaatgggtcagcgggcccgcgaactgaaacatgacccagaccgccggaatgccgtagccgaatgtaataaaaatcgcttgtctcagccgtttcagcacaatatcatattgggacagcgcatacgcttctgaaatgctgggaatcataacgaccatcagcgaatgggcgataaatgcgggaaacgaaccgattgtcatcgctacaccggcaagcattccgtattgatcaatcgcggcggtcccggctgccccggacgccagcagcgctcctttaaccaagaagggttcaattgcgtttgtcaccgcatgaaatatacgaagtcccgttgtcgggatggatacggccaggaggcgtttccgcacgtctttcccgcgaagatgaatgtgctgatggccggaaagcgccctccgcgccaaaataaactgcgtatacagataaacgaacaccacaacatcgcttgcgaccagcacaaataacgaaataagcacggccatatcaatttcaaaagagtaccattgaaaaaagataaacagacaaagcacttgaatgatttttttcaagacattcgcaaccgcgatttttcccatttgctgcacacccataaaataacctctggcgatggatgtaaaagcgacgactggaatcagcccgatgacaatccctttaataaacgggtgatacgtatcgaatacaggaatgaacggcagcgcgatgcttgcggccgcggttgaaaacgcggtaaaaacggcggtcattctgaaggcatgccgaagcatgctttcatgcagcttctgattggattccgcgatgaattttgaaatagagatcggaagctccagactggcgatcacgataattaaaaaaatggtgggcagaatgctcatgtaaagccccatcccatgctcgccaagctcccgcgccagtatcatattcacgacaaattccagacattccgcgaaaaaggcggcgatggataaaagaatgatccctttcacaaatcgattcatggtgtctctccttgtctcacgttcttccatcatcatatgagacaagttctgaaaatattttcgatttctcaaaattgaaaaaagcatagcggggatattttttatcccgctatgcttcttacatcgcaaatacgtgtctgccgatccgttcgataatttttcgggaacggatccagtggtcagatgccgttttcggattgtagaaaaacaacgcgttcgtttctctgcccggatggtctagcgcctcatttgcggcggcgatggaatccttatccggcttttgattaatgcttccgtttgctaccggttcaaatgcattcctttgatagatcacgccccgaatggtatccgggaaaccgtttttttcagtacggttcagcactacgctggctaccgcaaccttccctttataagattcacctttcgcttctgcgtgaacgagacgtgacaggagctgtctgtcagcgcgggaatacgtttttttcggcggctgataagccgtctcgtccggttttgctttcttctcttggtgagatgacagctttatcggttggatagagtgcttatgatccgtttctgagagcttcggaaccgggctttttttatttaaatcagcaaccagtgtgctgggttcttgctttggcttcttcgcaaaagtaaacagagcttctgtatgttcaatttttgatgcaggcataaaacatagaaaaaagacagccaaggcagcaaattttgtcgtcatacgatttcctccttaaatacttcactaccttaacaagagctgtacgcaaattcacggttaaagattttccaatgctcccaatcagcttttatgatggaagaagtttgttaacagccttgttattggcaggaaaacagccgtcattttcacaacattaaccaaatagcagtaaaagtatccatcggagggattttacattttgtttacatctgttacagccagatgaaataagcagcgaaaacaaaaaaagactcctcaagtgcgaggagccgtcagcttcttggctgttctaaatactggaagataacatctccgccctgctgggcaataccgcggaaatgcttaaaatcttcctgcttcgacaaaaccgctcgaaatgcaagaaaatgttctttctgcaccctgaattctttgatttcaccgatgcgcatttggttgatacgttctgaaatttcctcaggcagcaacgaatacagcctccttttctcggctttttcccgaaaaacaatataccatctttcccccgccgggacaatgattgagcgggctgatacccatatcgctttacttcttaaagaaaatactgcaaaatattttcaaacaggatttatgataaaggagaggaagctcgtgaaaattgctaaggttggaaacgtcattgaatttaaaaacggattaaccggtattgttgaaaaagtaaatgaaaactccgtcatcgttgatgtaaccatcatggataattatcgtgaccttgaattagattccctcactgtcgtcaaccataagaattataaaatcatcagagactcctattaaaccccccgaacaatccgaaccatttacatatcccgcacaaaagctgccgcccggcagctttttcaaatgaattcagatctcggtcatttccacaaaaaaatcatcggtctcatctttattgtaaagatttgtgacggatgtatagtagttggttattttaccgcggaattcaagcccacgctcgggcgccttgatgtcaaatgttttttcatacaaaaggacggcaatatcatgatacgtttcagaggtcaccttcaatacgaatgaaatcatacggccgtttttacccgcactttctttacaatcatacattttcagccttacaccgtttaactctaacggctccataacgaacactccttctttttacaggacatgctaccatgctggccattcctttacaattgatccgctccgaataagaaaaaacagcgcagtcctttacaaacatacgttccctattttataatgaaacagacgagctgccatccagcacccgtcacgtattgaagcggcgagtacactccccccgggtttactcgtctttttcttttctccaaatgatctctcttttccttatagaagttctgtgcaaatatcatgcacctttttggctgcgtggcagagacgaaaaatacccccgcttaaaaggcgggggtatttaggttatagtccgagtccgtactccgtctgaaattaacgattatcaatcgtctccggatacatatcatgattcatcatccgatgttcggccattttttcgtattttgttcccggtctgccgtagtttgtatacgggtcaatggagattccgcctcttggcgtgaatttgccccatacttcaatgtagcgggggtccattaattcgatcaagtcattcatgatgatgttcatgcagtcctcgtggaaatctccgtggttgcggaagctgaaaagatacagctttaacgatttgctttccaccattttttcatccggaatatagctgatgtagatggttgcaaaatccggctgtcccgttttcgggcaaagcgacgtaaattccgggcagttgaatttaacgaaataatcacggttcacgtgtttattcggaaatgattccaaaacctccggcgcatattcaaataaatagtttgtcccttgattccccaggagcgtaactccttctaattctgattcttttcttgtcatataaatctccctttctattaaactccccgtttattgccccaaagcagcgtatgcagctgaggcaggactctgacgagattcagatccgaatcggctgaaaccttatcaacgagtgtttcgtattttccgagcagatgtgcgatcaatgcccggtcgtccgtcgtatggacgttatcgtttccgacctgaagataaaacgggatattcggataccgcttgtgcacggttttcgcgaattgcagatcttcatcattaaaaatgacgacctttaagctgaccgcgttaagcctttctgccgcatcaagcgaagacataatatgatcgagctttgcaaaatcggttgtcatccccgaacttggcggcttcggtgaaatcgtcaggtcgttaatcattgtgaaccaatcctgatagactgttccctgcgtttctaaagcggcgcgcaccccgtgctctttcagcagcagaatcagcgcgtcaagctgctttaacagcgccgggtttcctcctgagatggtgacatgagaaaaggcgtctccgccgatttctctcagctcgcggtaaatgtcttccgccgtcatccagcggatatcttttttggctgatccgtcccatgtaaaagcggagtcgcaccagctgcaggagtagtcacagcccgccgtgcggacgaacatggttttctggccgataaccatgccctccccttgtatcgtcggtccgaaaatttctaataccggaattcctttagccattcctatcaccttttttcgggcggtatacgcaatagcttgtcggggtttccctgacaaaaacctgcacgcagaccggctgattctccagtgtttcgaggtaggactgcaccttatcataaatcgttttggctacgacctcggtcgtcggcagtgaatatctgtcatcatcagaaaattcctcatggtcattcagcaatgtatggtcataagcgccgtgcaccaatttcttcagcacgctgaaattcacgagaaagcctgaatcgtccagttcatcccccgcaactgtaatatttactgtatacgtgtgcccgtggactctgctgcacgctccggcgctttcgcggggaataaagtgcgcggctgaaatgtgcatgtccttattcaactcaaacgaataaggatgctgaacctgcgggtaaatttgagaaagcaattagttccgctctcctttcattttcatatattcatcatatcctttattgcggagcaggcatgccgggcattcgccgcatccgtccgcaatgatgccgttatagcaagtcagtgtgttattctttacaaaatcaagcgcgccgagctcatccgcaagtttccacgtttctgctttgttcagccacataaggggcgtatgaatgacgaacggcttttccatcgccaagttgacggtgacgttgcaggatttgacaaactcgtcacggcagtccgggtagccgctgaaatcagtctcgcaaacaccggtaataatgtggcgcgcgccgatttgatatgcaagaatcgatgcaaaggataaaaatacaaggttgcgtcccggtacaaaggttgtcggcaattccccgtccttcgcttcaatttcgatatcatctcttgtcagcgcattcggcgcaagctgatttaaaagagacatatcaagcaagtggtttttgacaccgagcttttcggcaatcgattttgccacatcgatttcttcttggtgacgctgattataatggaatgtaacggtttccacttcttcaaagttttgcaaagcccataataaacaagtcgtgctgtcttggcctccgctgaacaccacaaccgctttttcttttttcatgtctttctctcccttatctatcattccataaaaaaagcgcctttttcggagaaggcgccctaaaaaacataaaaaaaccgtatccaaggatacagctcgtccttagttttttatagagggtgtagctagaacctctcccgcatcaatacggattttcttcttttttcacttttgctatcataccataatgttgtttcccgtgacaataaaaaaacagcctgaaccctgtgtcaggctgcaaaagcgggtttaagccccgcgtttcttccccggaaatgccatcagcgcaatcccgatcagaacaaataaagcaggccagaaaacagaaaccggaatgatcggctgatacgtcatcataaagcaaagtgctgtcaaggtcagcactgcaaccggaatgagcagcgccttctgtttcccgccgaacagccacagctcaaataaaccgaatgccgttgccaacaggtaaacaggccatgtcacatcggagtagaaccaattggttgccgtttcaaagacaaacaagatccccgtgatcaataagatgccgcccggtacgagaagccccgcgtttttgacaggtttcgggccgaaaatcggaatgtgaaaagcggcgcccagcaacagaatgagagcgggccagccgcgttcgctgatgacttcatttgcattggtgaatatgccgaaaatgcccgcggcgcacagaaccgccgcagcagtcaaaagccctctttgccttctgccgaacagccaggcttcaaacagcccgaatgcaacggcaaagaggtaaacaggcgatgtcatcgttgcgtatgtccaatccgtcagcgtttcaaaccataacaagccgcccgtcacaagcaaaatgccgcccggaataagaaggcccgatctttttttcggttgcataaaggcagcggcgtgaaacaaaagcgcggctgcgatgatcaaaagcggccacagccccgtcatcagcataccggcaaagcatagtgctcccgcggctgtcaggataaaagcaggaatcaatacgccgatctttctcccgccgaaataccacagctcaaacagaccgagagcaggcgcccatatataaacaggccacgtcatgcctgaatacgtccatcccgttgcggtctcaaaacaaaacaggcagcccagcacaagaaacataccgccgggaacgagcagtcccgcctgttcaggcgtttttttcgcaaaaataaatccggcgtgaaaccctgcggacattataatgaaaagaaacggccacgccgaacctgcggatatatgtataactcccgccttctgtaaaaaaaacgtaatgccgatacaaataaaaataaatcccaataatacacgtcgatccttcatctcttactcctccccatcatttcccaattcattatacagaaatggcaggaaaaaagaagggaattcccaaaatatacagacattttccttatttttctttcgggatttttttgcaaatcaatgcgcccataaaagcgaggctcacatacccaaacaccggataaacggtggaaatcagctgtccgtaaccgatttggctgataatgaaagcaaacgccaaaatgccgccgtaaatatatgtactttttatatgaagaaaactgtttaattgtttttccaatccgtataaattgccgataaccgacgtaaacacttccccgaaaataataaacaaataaatgatatgaagcgaacgcgaatacgaatagacaacttgagccatcggaatgtcaaactccagcacatccggcagcaccgataatgataaaaagctcgcggcaagcaccagtgtcaacagaacgccgcctatataagctccccttctgatcaccttctctgaagacatttcgttcgcaagcggcacaaggacggcttgggcgagcgataaatttaacgcgccgtaagagacggcggacaaaagccagttccacttgtcaggccatacccattcgtccgcgtttctcgtgcttgtaaatacaaatgaatcagctgtcacgataaaagagaaagaaattaaaagcggcaccaccaatatattgacgccgaacacacctttaacaccgcttgtcatgacggcaaaactcagtacgatcgtcagtaggatccccgcttgtgcgggccagccaagctgttcatgaaacagcgctccggctccggacagcatgacagaggtcactcccagcaatataaacatcataaacatgttcacggcgcggccgatggactggccgaataaatatgtgttcaattcctgataagatgctgcatgaatccgtttggaaataatcatgattttggcgcctaaatatgtaaacatcagaccgcttaccacgataccgaacagaccgatccagccaaacttcagaaaaaactcaacgatttcccgtcccgtggcaaaaccggctcctacaaccgtgcctacgtatacaaatgcaagctgacttgcagaaccttttgtttgtcccatttcaccctccggctaaacgcagatttgtccaggcctttatatatgcttatgagacaagtctcccgaaaagacgaacaaatcgtccttccccggaaaaaacagattcagctctctcctctaagcaaaaatattgaaagaaaaaaagggccggcgtatactcttcatcaagaaaggtcaaagcatttcatttcctttccgactatattggtcaaaaataatcaaacctcacgaatatcacttatcatgctgtaaacatttatttttcggggtttgaaacaaaatacttgaaagtcaaagaaggtcagagtatactaataatcaaagaaggtcaaagtttcgaccttattttctaacccatttggtcaaagatgatcaaatatttttcgaggaggttttggcaaatgcgttgtcaacattgtcagaaaaacgaggcgacgattcgcctgaacatgcaagtcaattccattcaaaaacaattcgttttatgtgaaacatgttatacagaattaacccgaaaaccgtctatgagcatggggccgcaatcattcggattcccgtttgagcaaggtttcgctcccaatcaaaataaacagcaggccggccctgaaaaaggcctgcttgacgagctcgctcaaaacgtcacaaacggcgcaaaagcaggtctgattgaccctgtgatcggccgcgataatgaagtggcgcgcgtaattgaaattttgaaccgccggaataaaaacaatccggtgctgatcggtgagccgggcgtcggtaaaacggctattgcagaaggcctcgcgcttaaaatcgctgaaggcgatgtgccgaacaagttgaaaaacaaagagctttacctgcttgacgtcgcttctctcgtcgccaatacagggatcagaggccagtttgaagaaagaatgaaacaattaatgaacgaattaaaagaacggaaaaatgtcatcttgttcattgatgagattcaccttcttgtaggtgccggctctgccgagggatcaatggatgccgggaacatcctgaaaccggcgcttgccagaggcgagctgcaggtcatcggggcgacaacgctgaaagagtaccgccagattgaaaaagatgcggcgcttgaaagacgcttccagcctgtcatggttcacgagcctacaatagaacaagccatcagcattctggaaggcattaaagataaatacgagaaataccacggcgtcacattcagcaatgaagcgataaacgcctgtgttacgctttcatcccgttacattcaggaccgccacctgccggataaagcgatcgacttattagatgaagccggctctaaggcgaacctggaacttgataccgtaaatgaagaagatgcggctgagagactcaatgcaattgacgcggagaaaacaaaagcgcttcaggaagaaaattatgagcttgccgcgaaactgcgtgatgaagaagcagctttggaaaagcagctggcgcatgaaacaccggcctcttcacctgaaatcggcgcggagcatattcaagccatcattgaacaaaaaacaggcattccggtcggaaaactccaggctgatgaacaagtcaaaatgaaggaacttgaagagcatcttcatcagcgtgtcatcggtcaggaaaaagccgtgaaaaaagtggcgaaagcagtcagacgaagccgcgccggtttaaaatccaaaaacagacctgtcggctccttcctctttgtcggaccgaccggagtcggaaaaaccgagttatcaaagacactcgcagatgaactgttcggtacaaaagattccattatccgtctcgatatgagtgaatacatggaaaaacacgccgtatcaaaaattatcggttcaccgccgggatatgtcggacacgatgaagccggtcaattaacggaaaaagtgcgccgcaatccgtacagcatcgtgctgctcgatgagattgaaaaagcccaccctgatgtccagcatatgtttctgcagattatggaggacggccgtctgacagacagccagggcagaacggtcagctttaaagataccgttttgattatgacaagcaacgctggaaccggcgaaaaacaggtgaaagtcggattccaatctgaagagagcgtcatggaagaacaaacgctgattgattcactgagcgcgttcttcaaaccggagtttttaaaccggtttgacagcattattgaattccaatccctgaaaaaagaacatctcgtgaaaatcgtcagcctgcttctcacagagcttgaagacacattaaaagagcgcggcatcagcctgagcgtcaccgatgatgcgaaggaaaaaatcgctgaaatcggctaccaccccgctttcggagcacgcccgctcagaagaaccatccaagaattgatcgaggacgaaatgacagatcttctattggatgacaacgaaatcaaagccttccatgtcgtaatggaagaggacggcatcaaagtccgggcacaataagaaaaaagcggttccctcctcgcggggagctgcttttttgtttctttctccatgccggaagggagaaactgtgaagaattcgggaacaatttttcaatcaccctaaagttccatgcactgccaccgatattaaccatagaaagctagtataaaggatttggtgaaaactatggataaaacatcgattatcggtatcatcctcgcagtgattgctttaagcgtgggcatggtgctgaaaggggtcagcttaagcgcactcgctaacccggcagctattctgattattttgttcggtacgatttctgcggtgatcatcgcattccccggaaaagaaatcaaaaaagtgcctgccctttttaaagtgctgtttaaagaaaacaaacagctgacaattgcgcaactaattcctatgttctctcaatgggcgcaaatcgccagacgtgaaggtctgctcgcattggaagcaagcattgaagacgtggatgacgcatttttaaaaaacggcctgagcatggcggttgacggacaaagcgcagaatttatcagagatattatgactgaagaagttgaagcgatggaagacagacaccaggccggcgcagccatctttacacaagccggcacatatgcgccgacactcggcgttttgggtgcggtcatcggccttatcgccgctctttccaacatgaacaataccgaggcgctcggacatgccatcagtgcggcgtttgtcgccacccttctcgggattttcacaggatatgtactatggcatcccttcgccaacaaactgaaacgcaaatcaaagcaggaagtcaaactgcgtgaaatcatgatcgaaggcgttctgtcagtgcttgaaggacaggccccgaaagtgatcgaacaaaaacttctcatgtatcttcctgcgaatgaacgcgcaaaagtcgctgaacaagaaggagaggcaaacaatggcgagaaaaaagaagaagaagcatgatgacgagcatgtggatgagtcttggctgatcccgtacgcggatttgctcacccttcttttggctctgttcattgtattgttcgccatgagctcggtcgatgcggcgaaattccaaatgctgtctaaatcatttaacgccgtgtttaccggaggcacgggtgttcttgaatattcaagcgtcacccctcctgaaaacgaaaaagacggcgttgatcagttaaaaaaagacaaggaaaaagataaagaacagaaaaagaaagaaagagaagcagccgaccgcgaagaacttgaaggcgtgcaaaagcaagtcaatcaatttataaaaaacaaaaagcttgaaactcagctggaaacaaagctgactaaagaaggactcttaattaccattaaagacagtatcttttttgattccggacgggcggacatccgtcaggaagatattccgcttgccaaggaaatctcgaatctccttgtgctgaatccgccgaggaatattatcatcagcggacatacggacaatgtgccgattaaaaactcacaatatcaatctaactggcatttaagcgtcatgcgggccgtcaacttcatggctattctcacggaaaacccgaaacttgacgcaaaagtattcagcgccaaaggtttcggagagtataaaccggccgtgtcgaacaaaaccgctgaagggcgcagcaaaaacaggcgcgtcgaggtattgatacagcctagaaacgccgcgactgaccaaaatcagtaatataaaaaaggaagcctttcaaacggcttccttttttatttctgatgaaaatgtttagcgtttaaccccactcttttcagcatttccgtacacatttctatctcttcatcactcagcacactgatcatttctttaatttcttcagcatgatcagggaaaatatcgtccaaaagacggattcccttttcggaaatttgtgcgaaagtcactcttctgtcagtcggcgaggcttttctgatgagaagttcttttttctctaatttgtcaacaacatatgtaatacttccgctcgctaataaaattttgtcgccgatctgctgaagcggctggttgcctttgtggtacagcagctcaagcaccgcaaattccgtcgggttcagaccgtgcttatgaatatgtttattcatatggtcgttaatagatcggtacgcacgtgacagtacaataaataatttcaatgagttttctgttttatccgtcatacattcaatcatccttttacaaaagaaaccgttacagagaaacattaataaacaaaatgaaaaatgtcaacaaaaatgtttccaaaatttctcttctttttgtctggccttaataaaataatttgtttttctatcattttggttattttttcttattaaagaagtataaaaatgatataatacctctattcaagtgtaatgttggagcgatgcagagtgaatacatttaaaggtgcccggggaaagatcaaactttatctcatattggtgatcatcccggcacttattatcagctttttcatttatgaaaaagaaaagcagaaaatagccgataaacacatacaggaagccagtatgatgctcaaccttcaccgcaataagctcaattatttaatcggtgaaacaaaagcccggatgacaacacttgcgatcgctgtcgataagcctgtcaatgaagaaaagatcattgatattctcgatcaggcttttgaggatgaacccagattcagcggtctgtatatgctgaattccaaaggtgatgtcatcgcaagcacgactgatctgaaatcaaaggtgaatttggccgaccgaccgtattttacgaaggcgaaaaagacgaaaaaaacggttatcacaaatgactactccagcagaattacaggccagcgcatcttcacgatctgcgtgccggtgttagacgcaaaacgggaagtcacggattatttagtagccgccattcaagtcgattatttgagaaatatgatcaatatgctgagccctgacgtttatgtcaaggcaaccaatcagaataaagtgatatttgccagcggacgggctgatcaatcagaaggggtgaaaccggtcagcggctatctggatgatattaattggaatatcaatgtttatccgaaaccggttgagctgaacgagctgaccaaaagcgtactgctgccgatgtccagtattgccgtgctgctgaatattctgttcatcctcgtccaatattatctgcttaagcgcaagacccagctggagcgcgctcaaaatgaagcgcagaaattggagctgatcggaacgcttgccgccagcaccgcccatgaaatccgcaacccgcttacagggatcagcggcttcattcagcttttgcagaaaaaatacaaatcggaggaagatcagctgtatttctcaattattgagcaggagattaaacggatcaatcagattgtcagtgagtttttagtgctcggtaaacccactgctgaacggttggaagtgaactcgctgcaggatattcttgatgagattatgccgattatttattctgaagggaatctgtataatgtggaagtgaatgtggagattctcgtcaatcggccgctcaaggtcaactgcacgaaagaccatattaaacaggtgattttaaatgtcgcaaaaaacgcgctggaatccatgcaggaaggcggccggctgtccatctatttagaagcccgcgaccataaagcagtcattaaggtggccgacaacggaatgggcatttctgaagatatgcttgaacacatttttcttccgtttgtaacgtcaaaggaaaaaggcaccggcctcggccttgtcgtatgtaaacgaatcatgctgatgtacggcggttcgattgacattcaaagcgaagtcgataagggcacagaggtcaccattacccttcctgccgcttcacgatgaaaaaaacaccctgggtcggggtgttttttatttaaagaagaatatgtgtaagaggatataccagaggaacggcatcatagccggcagatagtacgaggcgcttcgtgagccgtgccagcggaaaaatctgctgactgtacgcggtcatctttcggatgcggcgcttgatcaggaagcgcattcagtcttcgttatctgttttatcatcaatcatttgtttgcttcatatgcaggcatgacgtcaccgcgggagaacaagcctattttcttcacaaggccctgtattccttggtgatgtgtgcgatcacggtttaccagctgctgatacgcgttcatcagacagtccagttcctggctgtgcctgatcgtgtcatatccggtaaacccttgtctgttagccgcatctatcatcatttttctttttttatcaatagatacaagcaatttttcttgttcagaataactgcccattcacttcacccctcaccgctaaaagaataggaaacaagtttgattgggttattgagcattattacagattatactttatttgtaaacatttttttactaaataacttattttttcatttcatattggaatctttagcatgaatacgagaataatacccattcaggtaatgatataaacagaatgcggcatattcaagatttaaaaaacagccacagctgactttatattacaataaaaaacctctcataccggcgggggcatgagaggttcgggcgtctatcagttttgcacactttcattttcgtaaatcggcacccagccctcagtcgtcacgaaaattcggattgcgacgacccggcggtcttcctgaagcgtaaagtagtggcggatgttctccggaactgaaatcaaatcgcccggatttaaacggacgtcgaaaaatgtgccgtctttgccttgaatgacgaagatgccgtgtccgctgacgataaagcggacttcatcatccgtgtggtgatgttctctttggaaattttttaataattcatcaagattcggcgtggtatctgataaagaaatgacatcctgagactgatatccgcgccgggctgaaatgtcctgaatctccgtgtcaaacgccgcgagaatccgttctttttcatcttctgtcagattgtatttctccgaaagctcagacggaagtttttcaatgttccactgctcatagatcacctcttgttcgtctaaaaagcgcgctacttcttcctgattttcaatgagcgtattcttttcgtcatgtattctgatggtcgccattttccgttcctccttttattttacaagctgcggccgcagtgacagaagcttgaggtggcagctgaataaaaattcataggcttccagcacccttttcgcttcaaatgcggtccgcccccatgccgtaatgccgtgattacggattaacaccgcgcctgagccggcgtccgcatggtgcgcgaagttttcggccaatgccgggatgtgcgccgggttgtcaatgatcggaacggtcacggacgcgttttcctcccataatccgagcgccttaatcatctcctgcccctgaaacgtgatttgtttttcatccccgtaaagctctgagatgacattattattaacggtatggacatgcagacagcagccggcttctgtcttttggtataagtaagtatggagaagcgtttccgctgaaggttttaaagaatggccggtctcagcgggcttcccgttctcatcgattaagagaaaatcttcgtctgtttcttttcgtttgtcttttccgctcgccgtaacgaggaaagtcagcggcgcgtcggatactttgatggaaagattcccgctcgttgccgggaaccagtctctttcggccagctcgcgctttacctcggcaagttcgcgccagcgttcttcttttacagccacgcctgcacctccccgatgttttcaatgcctgttttcacctcatgaaaatcttgaaaaggcagatgccggaggccgagttctttgcattcagtcaaaagataatctctcgcaaaacacatatcggataactttgcagcctcaacatccgtgaccgaatcaccgatcataatgagaaatttctgctgatcggacagcttccggatgactgacggtttgcagcagccgcattgattggtgcagcctccgtcacaggcgtgcggccagtctatatgaatatattcattgtcaaaggatgcatgattgcagaaaatccgctccttttctacgatcccttccaaaagcggatgcacaaaaaagtccattcctccgcttacgatataaaacgggaggccgtttgaccggacaaacgagacaaaatccaaaaagccgtcccgtattttcgcatccttcagaataaagtctgtcagttcttcttttaagctgctcggcagcagtccgaacatccggccgactccttcttggattgataggcttttagacagaacaccgtcttttaattcaatccactcagggggcgcgaattctttcatcatgctgacaatgttgtcgttcatggtgaccgttccgtcgaaatcacaaataatcagcggtgtgcgggtcatacggcttccacccttccccatttgtctaatgcgagctgaagatctttgcacgacgcggctttttcttcaatcggctgcgcttcaagcaccgcatcaatgatggcgcggaacgctcttccgccgccctcggctcctttcggatggccgtgaatgcctccgccggcattgatgatgtgatcgatgccgaaatcgcgcatcaacaatggcaccataccgggatgaatgcctgccgacgggacggcaaacgacggatgaaagacatcgtcttttacacattcatcatggattgcaagcgcggactccttcggaagagcaacggatccgtaaggtgacggaaataaactgaaatcagcgccgcaatagcggttcagcttgccgagcaaaagcgcatgcgacaagccgtaaacgggagatgaagtgaacgcgccgctgactgccggatgcgccatgatcggaagcgggatttccctgtcttctgcaaggctctgcatcacatctaaaccgtaagcgaacacattcaataaaagcgcgtccgccccgagttctgccgcgcgcctcgctttatcccgcagttcagcggtccttcccgtaaggtttacggcatacagcgttttatgccccgtctcctcccgggtttccttcaggacttgttttccttcgataatgcgggtttcaaacggagccagttcattttcaaagaaaatttcgtcatctttaatcagatccacgcctccgagcgcctgctgtctgagctgttctttaatgtcggcgagattccgtccgatcacgcctttaaatatgctcatcagaagcggtctttcaaattcgcccagcagtttgcggatgccgtatataccgaatttcggcccgggaagggagcgtttaaacccttcggaaaattcaagatcagtcaattttatttttccgtccaatgacagctttccgaataccgtcgtcaggacggccggaatatctcttgaaaagttcgcctcgggataggcgatagtgatgacggattgtgtttcgttttctgaggttccttctttctcctcaacttttacgacccggcctttatgttttctgagctgttcctgcttcaccaggggcaggtcagtccaggagcctaccgtcagccccgccgcaatctgttccgcccgcttttcactgtccgttgtgtctgtcagaagatatgttgccaatacttcgctcatgcgtgaacgcctctctttctttcacaaaacataaaaaaacctcttccgtatgagcagaaagaggcttcgtgttatgtccgaatcttatctctcagctcctgctgcaagaattagcaccgtgctttatcagtcggttgccgggcttcatcgggctcgtccctctgcctgctcttgataagaataatgattttataaagtattttgaattatcgcattgttatccagatatgtcaatgctttttcgggtgaaaagattcagtttcccgatccgttccgcagcttctttaagtctttcttcacttgtcagaagaccgactcttatatagccttccccccattttccgaacccgtttccggcagcgacggcgacatccgctttctcgagcagcagatctgaaaacgactgtgacgtataaccgtcgggcacagggagccatgcaaaaaaggagccagccggagccgtcacatcccagccgataccgcggcaggcttcaatccatgcattgcgcctcgattcatatctgtcattttgcgctgcgacgcatgcctgatcctctaaaagagcggctgccgccgcctgctgcgccgcgggaaacaggctgacaaacatatgatcctgataaagattgatcgcttcgatgacagaagcgtttccgacggcaaatccgacccgccagcccgccatattatacgttttggacaaggtatagacttcgattcccgtctcctttgcgccttccgtctgcaaaaagctcagcggtttatgcccgtcaaagccgacggctccgtacgcgaaatcgtgaacgacacaaataccgttttgttccgcaaaaccgaccgtctcctcaaaaaacgcctctgtcgccacagcgccggtcggattattcggataattgagatacagcagcttcgcctcgctccgcaccttttcaggaattacgctgtaatcagggagaaaccctctttcttccgtcagcggcatcatttccattttcgctttcgcaagggcgacgcccgaccagtaatcaggatatccgggatcaggcaccagaatggtatctcccgggtttaaaagacattgcggaagctcaacaagtcccgccttgcctccgaacagcacggcgacttccgtgtccggatcaagcgtgaccccgtactccctttcataaaatgcagcggctgcttttttgaagctgtaagcgccccggaatgatgagtatttatgattttccggcctttcgacggcgcgcttcatttcttcaacgatatgctgaggcgtcggctgatcagggtttccctgccctaaattgatgacgtctctgccttctttcagcttttgatttactttttgcaccaatgatgcgaaaaattgttccggcagctgtttgagtacatctgagatttcaaagttcatatttttcaccttctaaaaatgtcttgaaatgatagtccatcatcatatatggttaaataaaaaaagtaaagagaaacttgaggtgttaaaaaatgaaatggaccgtttcctgtttgcaatttgatatttcatacggaaatccttcagaaaattttaaaaaagcggaatctttgattgagcaagaaagccgccatgcggatgtaatcgtgcttcctgagttgtggacgaccggctatgatctcacacggctagaccagctggcggatgaaaacggcaaagtttcggaacaatggcttaaagaaacggcaaaaacatacaacgtacacctcgttgccggatcttttgcggtcaaagaaggcgaaaatgtctataacaccatgtacatcgccgataacagcggacagatcgtgaagcggtatcagaaagcccatctgtttcagctgatggatgaacacctttacttgtcagcgggaaacagcgacggttcctttgagctcgacggtgtcaagtgcgccgggctgatctgctatgatatccgtttccccgaatggatcagaaagcatacgtcccagggcgcgaatgtcctgtttatctctgcggaatggcctctgccccgccttgatcattggcgaagcctgcttatcgccagagcaattgaaaaccaatgttttgtcgcagcctctaactgcacggggtccaatcccgataatgaatttgccggccacagcctgattattgacccgtggggccggattttagccgaaggagaccggacggaaggcgcagtccgggcggaaatcgatgtgtcagaaagcgcggccgtccgcggaaccattccggttttccaagacttgcggcgtgatttatattaattttcaaaaaaatgttgacaagaatatccggcacctgctaatattttcatcaactgattaatccgaattgtgatacaaatcaatatattttctcttatcgagagttgggcgagggaattggccttttgaccccaacagcaaccgaccgtaattccattgtgaaatggggcgcgtacattttgcgccgagacgattgtctcataaggcacggtgctaattccatcagatgttatctgagagataagaggcggactgcactgtttcagcctccttctctttcagagaaggaggctttttttcgggcgtattctccgtcacgatctcttactgccactacataattggagggtaaatccatgtcagcaactaaaacaagtctttatgaacaattaacagaaagctccgccgccgcgttagccgtcaagctcggcttattccaaagcaaaagcactctgacatgccgtgaaatcggcgacggcaatttaaattacgtctttcatgtttacgataaagaaaaccaaaaaggactgattatcaaacaggcgattccttacgcgaaagtcgtcggtgaaagctggccgcttacaattgatcgggcgagaatcgaaagcagcgccctcatccgccagggcgaacacgtgccgcacctcgttccggccgtttactattccgatactgaaatggccgtcacggtaatggaagacctctcacatttgcagatttcaagaaaagggctgctggaagggcagcattatccgaacttatcggttcatatcggtgaatttttagggaaaacgcttttttactcatccgattatgcgcttgatgcgaaagtaaagcagcagctcgcaaagcagtttacaaatcctgagctttgcaatattacagaaaggcttgtgtttacagaaccgtttctcgaccatgagaccaacgattttgaagaggagctgcgcccgtacgcagaaaaagtttggaacaattcccggctgaaagaaggcgctgacgaattgaaagccatctttctgaattccgcggaaacattggttcacggcgatctgcacacgggaagcatcttcgccgatgaacatgaaacaaaggtgattgatcccgagtttgctttcttcggaccgatcgggtttgacatcggccaatttatcgccaatctgctgttaaacgccctcagccgcgacggtgacgacagacagccgttatatgaccatactgccgccgtatgggatacatttgtgaaaacattcagtgaagcatgggagaaagactgcctgccttcccacagacacctgctggaagacacactgaaaaacgcgtttgaggaagcggtcggttttgcgggatgcgaattgatccggcgcacgatcggactcgcccatgtggctgacttagatgaaatcactccgtttgacaaacgaatcgaacggaagaagctggcgcttgagatcggcgcctattatatcgaaaacagaaaagaactgaagcatatcaccgaagttctggaccaatttaagctccgtgtaaaggaatgatgcagcatgaccaatgaatttgccatcccccgttccgtggaatggaaagaaacctacatccgcattttaaatcagcaaaaacttcccgacgtcactgagtatgtggaacttgaaacaaaggaagatgtattcgacgcgattgtcacgctgaaagtaaggggcgccccggccatcggtataaccgcggcattcggactcgcgctctccgccaagtcatttgaagcccgcgacctttcagatttccgacgtcagttcgcggatgtcaaagcgtatttaaacagttcgaggcccactgccgtcaacctcgcgtgggcgcttgacagactgacggattccatcagggatgcaatctcaatcaatgaagcgaaaacaacgctcgttcatgaagctattcaaattcagattgaggatgaagaaacctgccgaatgatcggccaaaatgcgctgcacctttttaaaaaaggcgaccagatcatgaccatctgcaatgcgggctcgattgctacaagccggtacggtacggcgcttgctcccttttacttagcgaaacaaaaagacctcggccttcatatctacgcatgtgaaacaagacccgttctccagggatcccggctgacggcgtgggagctgatgcagggcggaattgatgtcacactcattacggacagcatggccgcccatacaatgaaggaaaaacatatatcagcagtcattgtcggcgctgacagaattgctaaaaacggagatacggccaacaaaatcggaacttacggcctcgctattttggcaaacgcctttcagattccgttttttgtggccgcaccgctttcgacctttgacttgcagattgaaaacggcgatcagattccgattgaagaaagagatccggatgaagtcagacagatctcaggcatacgcaccgctcccgaagatgtgccggtcttcaatccggcctttgacatcacaccgggcagcctgatttcaggcattatcaccgagaaaggaattgtgaccggttcttacacggaagaaattgaacaattattcgcagactgtcagctgagctgaaaaaccgctgatgatgttgcctcgggcaatgtcagcggtttttttgtctgcacaatgtaatcacttcatctttttgggcggctgtaatgagatgcattttaaaaaacagctctgcataaccggctatcttttgcggacggctcattttcatcaggcttcgtcctcctttttcaccagaccaacttttttcacttaataaaatgatatgtcggacgcaaaaaaacggaacgtgccatatgttttatttttctttataggatatttgttcgatgttcagcagcaccgcttttacatccgtcttcgtgcccgcgtatcccgttaaggcgctgtttttgccgattacccgatggcacgggacaaaaatcggcagccggtttcgtttattggcttgtccgatggcgcgcaccgctttcggttttccgatcgcttcggccatatcgccgtagcttcgggattccccgtaaggaatcatcgtcagcgcgttccataccctttcctgaaagggtgtgcctttttgtctcaaaggcagagagaattgctttctttctcctgaaaaataggatgccagctgctgtttcgcctccgacagcaaagcggtttcgcacggctttacgccgggcgcgtctttccgccattcctcaaaatcttccccggtgagaaacaggccggtaataaagccctcttcctctgttacgataacggttccaaacggcgcttttacacttgtaaaacagatcattccccgctccttctttcttcggtattctgccggatcggaagcgtcaaatgaaaaaccgtgcccttcccttcttcactttccacatgaatgcgtccctgatgttcttcgatgattttatagctgaccatcagaccgaggcccgttcccctgtcttttgtcgtgtaaaatggctcgcccagacgttttaatttgtcttcggaaatgcctgttccttcatcttgaaaagaaatcaaaatgtggtcttgatcagaaggctggatggtcacgtagatattgccgccgcccggcatgacttcaatggcgttttttaaaatattgataaacacctgttttaattgattcggttcacagtaaatcggcgggatgtttccggtcaggttcagatgaatctgcacattgacaagattggcctgggcattcaaaagatcagccgtgtctttcagaatctgcgtcacgtctttttcttcatataatatcgcctgaggtttcgctaaaattaaaaattcagtgatgatagactcgatgcgttttaattctgaggtaatgacgttaaagtacagggaatattcgccttcaatgcttccttgaagaagctgaatgaaccctttcagcgctgtcatcgggtttctgatttcgtgggcgatgcccgccgccagctcccctacaacatgaagagtgtcggatttccgcagcctctcttcaagttctttggcctctgtgacatctttaaagatggccagattcatattttgaatgatatttcttttgaaggagaattccagtttgcggctgtcactgctgcttaacaggaaggggatttcattatccattccttctaaatcaatctttctggcgggaacacccgcgttttcaatatcaaataaagaaagaatatccggaacggtgtacgctctcagctcctcatccggcatgccgagtatacggcttgcgagaggattcgcgtcaataatgcggaattggttgtcaaataagaccttgccgtccattgagccgttgaatacttttctgaatttcagctcgctttcccgcaattctttttccatccgcttacgatcgctgacatttcttaaaatggttaaatgctgaccttcaagtatggttcgttttgatgtaaactcaagctctttgtattggccgttcgccatctgaaacagcatttcttcacggatttccccgtatttttcatatttcttcttaatctgcttgtattttttctgcggatcaacgataaacgtacataaattcgtctccagcagcttatccatcggcagttcgaaaatgcggcacgccgattcgtttgctttggcaatctttccgtcatcagaccaaatgacaatcgcgtccatcgcgttttcaaaaatttcgcggaatcgctcttcgcttttaaagagtttcaattccatcaaccgtttctctgttatatctctcataatggacatgtagaacccgctgattaagttggacgtaatcgtaaattcaaacagcttctcttcgccggaccgaagcttgacgggcagttctcctttggcatttccttttctgcggagggtttcccagatttctttcagatgctttttgttttcgccgtcggtaaaatggcggagcgacagatgggacaattcattctggccgatctcaaagcttttgcaaaaagagaggttcgcatcaataaacccgccgtccttatcaaacagcacgatgccgtcgacagccctgtcaaacaaatctttaaacagctgctcgttcatggagaattcgcgctctaatatttttttagaggagatgtccctcatcaccacaaaaaaataatcctccccaattccgtctctggcgaggaattcaatgtatttcgtcgcgccgctgtcaagcttaatcggcacctctttccacagatggcctttttttaaaaactttttcacggccttattcagttcttcctgaggcacggaatataaaaagtccaggacggagcggttaataaggctctctgcctcaatctgcatcatccgggccgcagcctcgttcgcctggacgattttcatttccttacggcatataaaaatggcatcaagcgtgttattcataatcacatgataccggttcaaatcactcttcaggcggtcattttcctctttcatccgcttcagctgctctttcagcgactcgtttgtttgcaaatccagagtttcagccattcagtacactccttcttcaaaaacctatccttcaatatttctacaaaatacctcatcttccttcattcgccctatacatttcagaaaatttcaatgatatgacaagttaaagtctttttctacgatccttacctccccgttacatcatcctaacaatcccttttgtcctccttcaattttttgttttttattttaaaatgaacaccaacaggaaataatcatgcagtggatgatttttgaagagaaggtgatgctatgacaaaatcgcgagacagttactttgacaacgccaagtttatcttgatttttctggtggtgttcggccatatcctccggtcatttattaacggaaatgagtttatgctccatctctacaaattcatttatacttttcatatgccggcctttatcctggtttccggctatttcgcaaaaaactttaagcggaaaggttatgtgaagaagctggctgtgaagctgattattccgtacctgatttttcagggcatttactcggttttttactatttgattcaggatgaaagcatggcaagcgtcaatccgattgatccgcagtggtctctctggtttttagtcagcttattcttttggaatctgctgctttatccctttacgaagctgccgaaaatgtgggcgcttggggcgagctgcgggcttgccgtcatgatcgggtatctcgatttcatcagcagcacgctgagtctttcacggacgtttgtctttcttccgatgtttctcgtcgggttttatttaaagaaacggcactttgatttgcttcgggctaaaagaggcaggcagattgccgcgggcgtactggggattgttttcctcttatgctggtgcattgattttgattactcgtggctgttcggatcggagccttattctacattcggcacagtgtcgctgttgagcggtctgtcgcgcatcggctggtatgttttggcctttgccgccactttcagctttttggcgctcgttccgcaaaagcgttatttctttacgaaatggggtacgagaacgttttacgtgtatctgctgcatggattcattataaaaacgctgcggcagatcgggcttgaagatcacttgtctgattatcagaatttagtcatgctcttaatgttaacggccgctcttacgtccattctctccagcaatgcggtgaaaacggccgcacagccgtttattgagctgcggataaccggcttgcttcaagcggtgaaaggaacaagaaacggtgcttattcgaaataatgcaaaatacctcttaagcgttgccgcttaagaggtattttttattttttgccgtcttcttttttcttcggcttcgtctgttcaagcgtttcaatccattttccggcgttataatcaccgagctcgcttgaaaactcttcttcaagcaatttagggtccatcggctttttatggttttgcatgtctttgctgtggcggttttttttcgtcatattactcgcctccttgtttgccgtgttttgatttgcggtttgcgcctctcagtccgggatcaccgtcatattgtgttttgtatgcatctttgtccatgctctcagtcggtgtattgttgttggtcaaagcttcattctttgctgctttgcgtttcatttgatttcctccttctgtcagcaaatctgttttgaattcattaagcattttttttaagtcgcgcactgtcacgtttttggcctcatcaatgagttcatagccgatctgtccgttcggctcaagcagcacatatttaaaatcttgaatgtctccgaggccttcctgcctgatcctcattgacagctggtcttcggtaaaacgcattttttttaagttttccgggatgatttttccgtttctgacaacggcgacggtttttcctgaaaatagaaactcaaaaaagcttgatttgatttctaaatattccatcagaatcagtaccgcaataaaaatcgccgccgcgaaaatggtttcccataaattatgttcaataaacggctgaataataatcgagccgatcgaaatcatgatgactgtctgggtcaccgacagctggctgatggatttccgtccggcaatccgcaataaaaaggtaccgaccgcgatcataactaccgacttccaaaatacggcaaacaatgacgtcacctctttacaagtagaatctccaaagaaactgtttccactcatccattttacggcaataaaaaaacaccgctttctgaaaagcggtgtcagccgataatcatcctttccttcggataatgataatttgcttcgatttcttttcggccgatcaaataaaggaaagtcaaaatgccgatccggccgataaacatcacaatcatgatcacacattttccgatatcgcttaaatgcggagtaatcccgagcgacaggccggtcgttccgaaagcggaacacacttcaaaaagcagtccgaggagcgtctgatttgtctccgtcacggaaagaatcagcgtcgacccgaacacgagcagaatcgccatcatcgtaacgaccagcgacttcatgacatcagcctgatgaagctcgcgtttaaagaccttgaccgctttattccctctggcaaaatgaaacagagcaagaaggttaagcgcaaacgtcgtcgtacggattccgccgccgaccgagctcggtgatgcgccgataaacatgagggcgcagatgaaaaataatgtcggcgccgacagctggctgatatcaattgtcgcaagcccgccgcttcgcgtagcagttgattgaaagagacataaaaataaaacatcatgccagcttttccccttcataacatggcttgcttcaagcgcgtaaatgcccacggctccgaacaaaacgagcattccgaacgtaacggtcgtaattttcgtaaacagcgtgaatgagtatctgcgctgttttgaaaacaaaaagtcttttacttctacgagcaccggaaaaccgatcgcaccgaaaataatcagaagcatcgtaataaactgcacgaaatagtcatgtctgaacgggacgagtgaatttcccgtaatatcaaagccgccgtttgtcgtggcgctgacgctcgcaaagaatccgtgcaagtacgcctgttcaaacgaatcatagtatgttaaaaaatatgttcctaagatgatgccgcctaaaaactcgattaataaaatcaaaaacagcacttgcttcatcaggttgacgataccggaaaactgcgattgattctgatccaccataatgagcttccgttcccgcagaccgatccgtttgcccataatgagccagacgaatgttccgagcgtcataatgccgattccgccgaattgaagcacgaaagccaaaatgacaatcccggccgtgctgaatgtatcagccgtgttgacgaccgttaaaccggtgacactgactgagctgacagccgtaaacagcgcgtctataaacgaccagctggccccttgtttgtgggcggccggcagacttagcaaaataaatgccaccgtcacagcaagaaaatagtataatgcaatcagctgtgcaggcgacaagatctgtatgaatttcttcagttttaatttcataagatagttccttctgcctctcaaatgtagtacgtaattattctaatgatattgggagaatttttaaaggccttttttgaaagatttttcattaccttatgtaatttgccgatctttaaacaaaaaacctctgaaacgattgtcagaggttttgtttattattttgcttccagcctgcggatgcgctcatcgagatcagggtgtgtggagaacagtgacgaatgctttttgccgttaatttttaacgtctgcaccgccgtctggtcttcttcattcacatgtcctgtataagacttcagcgtacgcagggcgtgaatcattttatccttgccggcaaggtctgcaccgccgcggtcagcgtgaaactctctgtggcgcgagtaggcgaagacgacaagactgccgagaatggaaaagataatctgaaacacgatcatcgcgataaaatgcacgaccggtgcgaggtcttctttgacaaagcggcttgcaacccatgccgcgattcgggaaaggaatacgacgaacgtattgacgattccctgcagcagcgtcatcgtgaccatatcaccgtttgtgatgtgtgcgacttcatgggcaagaaccccttccaccgcagcatcatccatctgctgcaataaacctgaagaaaccgcgacaagcgaacggcgcttagaaggtccggtcgcaaaagcattgacctccggggactgataaatgccgacttcaggcattttcgtcatccctgcggcacgggacaatctgtgcacacggtcaaccaattgctgttcttcatagctgagtgactgtttcttcggatttaacacccggacgcccatcatcgttttggccatccatctggacattccgagagaaataaaagaaccgacaaaaccgacgacaagactgaacacgagcaatgccatcagatcaatgcggccattttgtatatacgagccgacaccggtaacgcttgtaataatcgtaagcacaattccgattgtcgtaatgaccaaaaggttcgttaaaataaacagaaatattcttttcgccataattacctccgtcttttttaagatcaaaagaacttatttaattaaattataaatgatctgtttgaaaatgcaacaatttcgacgtatgatgtaaatgtaattctcagtgatatcagaaagtgaacacgtaatcaatcagaggtgaaccatgaacacgtttaaactgacccgaactgatatggtccggcttctttacgcgttaaaaggccaaggagacgcaactcctctccaaatcttattgcaatcagcggaaatgacattggatgaagcggaaagccgtctgcatatccctgaatttctgacgagattcgaacgaaaaaaagagaaaaaggaatacgggctttcaactaacgagattgtcgagctgggaaatctgtgcgagctgacgtctttaaaatcaaccgccgtccaaaactgggtgaagcgcgatattaaagatttaatcggccaccccttactcggcaaaaaatatacaattgaacaagctgtcatccttctcattgtacgtgatttaaaatcaatttatgacttcgaacatatacgcggcatattaaaaatcgcttttaacacgatcacagacagatcagacgacgtcatcagcccgatcagctactatgaaagctgcgcccaagtgattgattatcttcatcataaagcaaacccgccgatgaaggaaacgagcctgcaggagctcgtcgaagagcagacggacaagctcaaaggctgctttaaagaactcggaagcggacaatggaacgatatcagatccatcatcgccgtcacggtgctctccgttttgactttccatattcaagcctcagcctacaaaatgaccagccatttattataattcataacgcttcttcgccccggtgtctgcgccggggttttttgctgtacaacaattgccagcataatcaataccgttccgtttgaaactaaaatgcgtaaacacatcttgccagagaaaaggagatgaaaaagatggcgagcagaaataaactcttagttccaggggctgagcaggcacttgaccaatttaaatacgaagtggctcaagaattcggcgtgaaccttagctctgatacagcagcacgcgcaaacggctctgtaggcggggaaatgacaaaacgtcttgtacagcaggctcaatcacaattaaacgggaaaaatcaataatgcagcttattcgccgggacttctcggcgaattttgatatttatcggcattctcctttccgtgccggtagccgttcggattcctgcggtctgacgaatcttcatgatgccgataggagtcccaatgttcattgcgatcatgattccgctgattccagtaatgattgtaatacttttgcttaggctctttgtcatttccgttttcctgaggattttgtgttgggggctgctctgtttccccatcttgttccttctgtgtgttttcttctgatccggaagctgcatttttgtcggtttgctgactgccgtcctgactgtccggcttcgcttcttccgtgccgggcgttgtttcattgttttccggcttctctgctgccttttcttcatcaggagctgtcttttcatcagccgccggcttttctgtgtccggctgtttgctttgatcagcgtctgtttcggtatctttttgatctgtttcattgccgtcggtttgcttttcagactgtttttcttctgttttcttttcgtttcttcttatgtagctgcctgttgacatcccttcctgttttgctttttctcttgtttccatatcagattcaagagattggacctggtaggtgcccttatatttttcagtcatgtcagccagctgttttttaacgccttttttatatgtattgtcatctgtattttcataaaccgtggaaattaaaatctcttttgattcctttacatatccatgcttgctgcaatcggtaataatattattgatgacttccttaaaatcgctgcttttccaatctccgatgtcactgatgacctgtttggcgtcatggttcagcggtgtcagttcaatgacttcatatttgctgtttaaagccatttcaatgctgggattaatgtcaagcgtcatatacgcgtaagctttgttatcagaaaaaaccgggagcaaaattaaaataaacaaaataatagcagtcatcgtaaacactcccaatttaaaagggcgcagtttcagaaaatcaaaaaagctggcccttcttcccatacgcgtttcgccttcgaacgtaatttcctctccgatttcacaagtgcggtgatcattttttgtttttaaaaattgtccgtcaggggttagcaacgtgacgaattttttatttttctctactatgatccctcttctcatgagtgcaacacccctttaagataatcttttaaataaatataatcaccggtaataataatactcatggcgatgatatattttcggttccgttcaatcgtttttctgctgaccgacacaagctgctccagctgtttgacaggaagctgttttttctggtgcaaaatggacgccagctcttcattttcaacaagcgtgtaggctaccttaatcgcattctgcctcgcatcagtatgcttcggcgattgttccagcagctctttaaaagacaggccgtattctttcagctgcttctgaaaaaaaagaatttcttcccggcgctgttcctgttctatctgtttgcggtattcatcaatggaaagctccgcttcgataaggctctgcgaagattcctggtcgtcgccctcctgcacatccatattgatatgctgagcggttcttgcttcttttctgatatagtctatcacttttctttttataatcagctctgcaaatgcaagcagcgaattacctttttcagccgaatacttttcaatagcttcgttaaacgcgatcagcccgatgctgaattcgtcgtctttttcatctatatatcgtttacaaacggatgaaaccgtcttcgcgataaaaggcttatattgctgtattaaatcgttctgcagatctttgtcgcctttttgtattttttcaacagatgtttcaagcgtttgcttcttttttcccaatttaaacaaaaggctaagcactggtttcacctcagttcctccctataactactcataatcatagctaatttagtagggattcgcaaaggaagaaaaagagaaatcgatttcatttgtctcaattatgacaagccaataagacgtactatacatgatttcgtgcccccatgcagaattaagggggttttctctgtgttttttgtaacaatgctgttataaaattgttatcatatgtcttaaatgtaagcgcttcaaacaaaaaagggaacctgctttctaaaaagccagactccctttttgatcattttacgcgtgttctcttttttccgatgccgcgccggactctgtttgttttgctcctgacataaaccatccgcaaaccgcaatggcagccagaaccgcccagaaaatgattttccaggccgccgaatggatgacatctgccggaattataccgagttcctcatgggccaacgtataaagagcgagcttcacgcctacccatccgacaatcacaaatgccgccgtttcaaggcccggcctggttttcagtaaggatacgaacattgatgccgcaaaacgcataatgattaaaccgattacgccgccggctaaaataacgagaaactgaccgccgtccaagccgccgatggcaggaagccgtgttcccggaagcgttacggcaagtgcgaccgccgctaaaatggagtcaacggcaaaagcgatgtccgcgagctccactttcaagacagtctgccaaaacccgctttctttctgcgttttctgcccggcgttatctttgaatacataccgcttcagcaaatggctgaccgcaatgtaaaacaggtataaagcgccgacggcctggacctgccaaacattcaccagaaatgaaatggcgaacagcgacccgaaacgcaaaataaatgcgcccgccaatccgtaaaataaagccttcttcctttgtttttcaggaagatgcttcaccatcacagccatcaccagcgcgttatccgccgccaaaatcccttccagcccgattaaaacgagaagaacccatccatactccaataataatgcaaagtccaatccattccctccgtttcttttttctatcatccgagcttataccggcggtttttttacgcaaaaaagacctttgccgatataaggcaaaggtcttgctagacatgaatgattggcatgccaacaaagtcgatggatatgatccatgaattgacgactttgtttccggaatatccggacgctactcccctttgggatttcaagaaatatttgtttatacgctcatgataaagcctgtttcatcatttgtcaacgcttaacttttttaacaaattgagaaattttttctgttttgacccgctgttttcttctcttcaaaaacatccaaagaacgagaagcaacacaatgaatataccgagcggcagcatatattgatcgagaatggaaccgacgcttttccaattttccccgagtttcataccgaggtatacgtaagcaaatgtaatcggcagcatcgctgcatatgtatagagagagaacacccagatattcatcttcgcaatgccgcacggcaaagaaatcagcgtcctgacccccggtataaaacggccgctgaacgctaccaaacctccgtgcttctgaaagaaatcatctgatttctgcagaaattcgggttttatccatatgtactttccatatttcagcaaaaacggccgaccgcccagcctgccgatcccatataagacaagcggacctgaaacaccgccgagcgaaccggcaaacacggctccggcaagcgtcatatccccttttgagacccaatagcccgcaagcggaagaacaatttccgccgggatgaattctatactgagcgccaaaaaaattccggcgtaagataagcttttaaacgcttcaattattgatatgatgaaatcttcgatgatctatcactcccggcttacgtctatattctgaaacttaagaatgattttaacacaaaaccttgaggctgaaatatcttttagacatgcccgttataaatatagtcgtttcagatcggtatagcgggagggaatgacatgcgcaatacaacgtcccgcctgtctcctgaatgctcgtctggcggcggttacatcacttaagatctccggaaagttaccatttgcggtaagcggcgctgaccggaattcagttcatatgggcagtgcgttttgccgggatctttgccatcgccgaatctgtttttatgggagcgggaaattctctcggtcactacatggaaatgcgtgggcatttcccggggaatgattctgtataatttttttgatcaaccattgatgattttcggggacttcagcgatttaaagaacttaccgattcacatgcgatttccttttcagccggctattaccgcatgaggaaatagaatagccgctccatgaacgccgcatcacccataagttgctacacatggaacggacccgtttatccacaataaagacaaaaaggagtttttattcatgcacacgatgtggaagggttcgatcagtttcggcctcgtcaatatcccggtcaagctctttgcggccactgaagataaagatataaaattccgcagtcttcataaagaagaccatgcgccgattaaatacgaaaaaatctgcaccggatgtgaaaagagtctggagcctgatgaaatcgtgaaaggctatgagtatgtaaaagggaaatacgtcattatgacagacgaagacttgaaagacgtaaaacaggaacatgaagaaaaagcggttgagattgttgactttgtccagctgcaggaaatcgatccgatttattttaaccggtcatattatgtcgggccgggagacaacggcacaaaagcctatacacttctgcgggaagcgctgaggacgacgggtaaaatcgggattgcctccattacgatccgctctaaacagcagcttgcgattcttcgcgtgtatgacaactgcatcgtgatggaatccattcattatccggatgaggtcagaaatgccggacatgtgccgggcgttcctgagcagacagccgttaatgaaaaagagctgcagacggcgatcacattaattaatgagctgacaaccgagtttgacccggaacaatacgaagacacataccggaaagcccttctcgccaaaattaacgataagctcgaacatgaagaagcgggcgtgacacctgctcctgccggcccgcgagaagatgtcattgatcttgtcagcgcgcttcaggcaagcattgaccggacgaagcggccgaatcgcgaacaggctgcaccggcacggacaaaagacacagcgtcagctggcggcggaggcaaaaagcagaagacgaccagacaaaaagccggaacgtcttaatcatggtgctgacgatgcagccgattttgacctctgtaccgcctgaaggcagtgagtggcgctatgaggtaaaatatgacggattccgctgtcttctccgcatagacgaaaacggtgttacattaaccagcagaaacggacagacgctgacgaatcaatttccggaaatcacggcttttgcggcccggtgttttcagcacatgaaagacaggttccccattacgcttgacggagagcttgtctatttaatcaatccgtacagagcggactttgagcatcttcaaatccgcggacgtttaaaacgaaccgaagcaattaaaagcaccgctgatagacggccgtgccgctttctggcatttgatctcctcgttctggaaggcgcgggcaccgtctcattaccgtatgtgaaacggaagcgcgccctttccaatctgcttaaagaagcaaatcttcccgcctgccctcatcacttagcggaagaagcgattcaatacattccggagcacactgactttgacgcgctttgggacaaggtcgtccgccatgacggagaaggtatcgtagccaaaaggacttccagcggatgggcggaaaataaacgctctcccgactggcagaagtataaacatatgaaaacggctcacgtgctattaaccggattcaatccgaagaacgggtatgtgacggcctctgttttgaaagacggcatcgtcgtcccgatcgcttccgtttcccacggcatgcaggcggaagaaaaaaacgccgtcagaaccattatggagacccacggaaaaaaacaaaaaagcggcgagtatacacttgagccttctatctgcatgaccgtgcagtatttaaccatattgcaggacacgctgcgtgaagtatcttttgtgtcctttcagtttgaaatggattggacggaatgcacgtatcagcagcttatcctccgctctaaaacgctgccgccgaagctgcagttcacaagcctggataagatcgtttttaaaaaacgtgaaaaaacgaaagcagatttccttagttatatggtgaaaatgagcgattttctgatgccctttcttaaagatcgggccgtcacggtgatccgttatccgcacggcgcgcctggcgaatctttctttcaaaaaaacaaaccggactacacgccggactttgtcacaagcgtgtttgacgggagccacgagcacatcgtatgcagcagcgtaccgtcacttctatggctggctaatcagctggcgcttgaatttcacgttccgtttcagacagtgcattctgaaaggcccgcagaaatcgtcattgatcttgatcctccgtcaaggaatgattttcctatggcagtggaggctgcgcatgtgctgaaacagctgtttgactcattcagcatgacgtcattcccgaagctctccggaaataaaggcattcagctttacatcccgctttcaccggaagcattcacctatgaagaaacccgtgcgttcacaatgctcatcgccgattattgcgtcaggacgcgcccggatctttttacgacagagcggtttatcaaaaaccgaaacggcaggctctacctagattatttgcagcatgccgaagggaaaaccattatcgccccctattcgacccggggcaacgaattgggaacggttgcggctcccctttattggagcgaagtcaactcctctttaacacctgatgattatacgatcgatacagtagtgaaccgcgtcaggacagagggagatccgttttatgatttttaccggaatccgcaggacggcccgctttcaatcgtgcttgagcaaatcaagagaaagagctgacgcttttggtcagctcttttcagtctgatacgtgcacatcaatttttctttggaaataaataaatagcaggagtaaggaatgtttttgagggtgagctgttttgcagtaaagtataaaatcggaagatgggccgctttcttaaacagcctgtagcagccgctggacggttttatcacatcaaaaccgagtctcgccgctcctttatgaagcattgtaatgccgacgactcccttaatctcgtctttccgtttatgctggttaatataatccgctaaatgaggcatggattgatataccttctgatatagcataatcccccttctgaccgcgctttcaataggctgcagctctttcaggagtttgacattatgaagatgaatcttaactaacacgtcgttttttttaatcctggttccgtcgctcaggatgacatcttttcctttatatctagtcaaacggacgcggaatacattcgattgccgtttatcaatcagcgtcagccgggtaaagaagaaataaagcggatcaagtaagtaccatatagacagcagacagcttctcacatgttcaccttctttatattcaaagcaccctcatattttggcatgaggcatgacacattatgattggtaaataatgatgcagccctgtatcagcttatgcaaaaaccgcttcaggctctactgtccgaaacagaaaaaaacactcttcatgaagaagagtgtctgtatccgctttcttttaacggaaaagcaaatgctggctgtgaattcctgcttttttcagtaaggctatcagctgttcctgttcctcaggcataagtcctgaaaacgctctcgcaattctcaatgaatgaatcggataaattttatccaaatactcgtttcctttatcagttaaatgggcgtaaacagaccgtttgtccttcgggtcttgttctctgaccaaaaacccgtttctttcaagcttgtcgatgacataggtgacattcccgctgacaagcaaaagacgcgacccgatttgctgaagcttttgcggtcctctcgtatagagcagctccaaaacggcaaattcagtcggattaaaaccgtgttctttactatcgcggatgctgtgttcagacacactcttgaaagcccttgcaaaaactttgtacaaattcatcgaacgcatcacttcttcttcgttaaatgataatctcatcatatctaccccgtatttaagatttttataaaaaaataatgtaaacccttacaattcataagagtcgttctttgttttatattctattcgtgccgtttttcagaattccttcttttttatataaaaaaatacccttatacatcatttaatttgtataagggttccgttctttatagggaatgttccgaaaaaaatacgcgtattcctttctcagctccgtaattgtcatggaattaagtatttctttcgtatagactccgatctgcagaagctttttggaataatggtttctctctttatccaatgcattttgaagcaaacgactcatgacggcctcctttgttttccgttattctatgatcagaataacgcttttatatcaaagatgtataaagccattgtaaaacttctgtagattatgatgtttttcggtaaagaccgttctggacggctctgagcagcggaaaagcgtgttccccggcaagctgcatgaacgcctccagcatttcatcgcgtttcatatctaattcaatgatttcttttgccagcgaaaccgctttttctttctccattcctatccttcctcctcattgtatctgtacaataagcataaaacgggggcacagaaccatgcattaaccttgtcaatttttctgccgctttttttctaaaattttctattccgcgtcagaaaacctgacaagcgtcaggttttttctctttttttcttatataatatgagtaaaagacatccaggggtggaaaaatgacgacagacgaacaatcttacaaagataaaaaagtaatctcgatcggcattgtaagcgaattaaccggattgtcagtcagacagatcagatactatgaagaacggaaattaatctacccgcagcgatcatcacggggaacgagaaagtattccttcgcggacgttgagcggctgatggatattgccaacaagcgggaagacggcgtgcagacggctgagattttaaaagacatgcggaaaaaagaacaggctctcaaaaacgacccgcagctccgcaaaaaaatgctggaaggacagcttaatgctcattttaagtataaaaaccgctgatcaaaaaagtccgcctcctgtgagacggactttttttataaagcatgaagaaatgcagttgcaatgccgaaataaattaataaggacaaaatatcgttcagcgtcgtaatcagcggtcctgacgcaatcgccgggtcaatgttcagtttatgaagaataatagggacgatcgttccggccatcgtaccgataatcaacgttgcaagcagcgatgaaccgacgacaaaaccgagcgttaagtctttctgccagacggttgcgacgatcgtaatcgcgatcgcacagacgatgccgatgtagataccggttcttaattcacggaaaatcagtttaaagatggtttttttattcatttcttctttagccagtcctctgatgacgacggcaagtgactgtgtgcctgtattacccgtcgttcccgcgatcatcggcatgaaaaacgcgagggcgactactttttgcaatgtatcttcaaaataattcagaatgcttccggaaatcaatccgataaacaaaagcagaatgagccacggcaaacggcggtacgccgccacgtatgctttcgtatcaaatgtaatcgccttaccggaggctgcgaatttttcgtaatcttcatcggcttctttaatcacgacgtcaataatatcatcgacagtgacaataccgacaagcacattattttcttccacgatgggaatggctaaaaagtcataccgctggatcagccgggcgacttcttcctggtcttggagcaccccggccgagatgacacgcgtaaacatgagatcctgcactttatcgtcaggctcgccgagaattaaatctctgtaagagagcactccgacaagctgcttgctgtcattaatcacgtacaaataatttattgattctgcgatttctgcaaagcttttcagcttcacgaccgcatcttttactgtataatgctgcggaatccagacgaagcggttcgtcatcatccggcccgccgattcttgcggatagttcatcaaaagctgtacggcctttgattcctcagcctccatactggataaaagctgttctttcagttcttcatccatctcttcaagcaatgcggcgagatcgtcgttatccattttattcattgcgagagtggctttcgttttaccgaccttatgcaaaacggcaagctgaaattcccgctccagctctccgatcatgtcggtgatgtcatcaaccgtcatatatgacagatagcgggcccggtgcttttccggcatttctttaaataaaaatgccatgtcatagggctgaagctcatctatcatgtttcggaattcttttatttttccgtcccgcaataaaatgataatgcgtaatatgagttcgtcataggtcatgttttggaccatcgggactcgtacctcctttacggagacgcgccgtccgtcaagggaagtgcggcggtttgtctcctcatcatgtcgtcactggttatctggctgtatatgggtacttcttctgacatactcgaatggggagaatccatactccgcacctccttatcatgctcagtcgtgtacgttttgaggcataaaaaaaaccttccgatatgaaggcgaaaacaagcacggcaaataaacgtgcggggcctccaatcgtagagctttagcactgtatggcataggacagccatccagctgcgttaagaatcaccttatgtcgatgattcctgttgacccattggcgtctttggacatttttgggcagcagcgtatctccatacaggagcctcacctaacgaagttcttatttgaattgacacactgagattacagaaaaaaaaggaatgtgtcaaccttaaatttgtgatttcagcacatgcctataaaataaacggaataaaggcataaagcccttattccggcaaatcgctttcatcgtcttctgaaaggaaatgataggattcatgcagcatgagcgcgtattccccttcttttgtcggatgcggtacatactcagcctcgttgatatactgctcttcccttttcttcatatgacagacctccttctcaattttagattgtccaaaagaagctccgttatcataggaaagaaaaaatcacttgcggaacgggacatgcagctatatttttcggatcgtaaaaaagttcctaagcagccacgggcccggtttgaaaccgagcgttaattgccacgcgccgatcgcctgcagtccgaactcccgaacgagaaccattttttcactcatgctccgcacatcctcaaaccacacttcatgcgttcttccattttcatcagtataccggaagtaaggggaacgctcctgctgggaataacggatcattgattgatgcttcatcgccgtttccatggcgcgctgattggagatggcagatccgatcgttccgggacggtacggaatcacccaatcatacccgtacagcggaacaccgagaatcacttttcttctcggcaccctgctgatggcaaaattgatcgtttgcctgacctctgttaaaggcgccacgggtcccggctcactgccggcgtggtgccagtcgtacgccataatgaacatataatcgacgacggctccgattccgccgtaatcatatcccctcagccacggcactgcatcacttgttttcgccggaaccgatatcgttaacgcgagctgatgctctgaaagccgggtttttaactgccggagaaatcctgtgaagagatccctgtcagcttctctgacccgttcaaaatcgatatttacaccgccgtatccctttcttaccgttaaggagacgatattgttgacgagattcgttcttgccgccggattctgcagcacttgatgggctaattccggactgaatcccccttctgtcagattcgtaatgacggcaagcgggcgcactctgttctgccatgtggtttctattgcggttctgtcgtttaaatcgttcatgatatctccattcgggccgaaatgatattcaaacaaagaaatcgccgaagaatacggcgcaaaatcattaatcagctctctatccgcttcaggcgtccgaatgacataaaattgcagggttcccgcaagatagttagagatatcagggatcttcactttcatacccgtccgcagccggttcggcggaatatccgggtttgcctgcatcagctgcatctgcggcacataagccttacctgcgataacggcatacgtatcattcggctgaaccgtatattcattaagagggattaaaagcgcctgccccggaacgatattcgtttcctcaagcccgttgacgcttctgatgctgtcaacagggtatccgtactttctgctgatggaaaataacgagtctccagactgcactgtatgaacaaacatagatgtcctccgtttccttttgatcaaaagggctcttcttatctttatgaatgatcttccggtccgattccaaactctgttcggagaaaggctgtttacaaatcagacatgatcaactatgatgatgtcattataaaaaactgtataggaaacgcactaggggtgctgttatcggctgagataaaacatgcggcaggcgtgttttgatcccttataacccgatctggataataccagcgtggggaagtgcagattgaccggagcgcagggtttttccccatgcgttttcgttctgctgctgcatattccctcggatatgcagttttttatttttcattaaaaaacgggggaggacaccgcaatatgaaacttacgatcaatcgtctttcgtaaaatcaactctttcatacttacgactatcgataagaaagcaggagatcacaatgaaaaattggaaaatgagagaaattgtcgtcatgtccgtcatcagtgttgtatttgctgtcatttatttagtatcaactcatgcaagcaatatagcggcaggatttttcggccggatgagctacgaaccgatttacggtatctggtttatcgtctcggtgattgccgcgtacattattcaaaaaccgggagcggctctcgtttctgaaatcatcgccgcgtttgtggagtgcttactcggaaatccgtcaggaccgatggtgattctgatcgggatcgcacagggaatcggtgcggaagcaatctttttagcgacacgctggcgggtgtataccctgcccgtgcttcttttatccggtatggggtcttctgtgacaagcttcatttatgacttgttcgtttccggatactctgttttgaatccgggtttattagccgtcatgcttctcatccgtctggtctcaggtgcgcttcttgccggccttctcggcaaagcaatcagtgatgcgctggcttacacaggagtgctgaacggcatggcgctcggaaaacaattcaagaagaaaaagaaacaggtgaaccaagatgcaggcatctgaaccccttctatccgccggccgtcttaccttttcttatgatcaggatgaaaagccgatttttcaaaacgtgtcctttcagctccgcaaaggagagcgggctttattgctcgggccgagcggatgcggcaaaagctcgctcgctctctgtttaaacggtctgtacccggaagcatgcgatggggttcaatcgggaaccgtttctttatacggaacacctctttcacacctgacagaacccgccgccagatctatcggcgtcgtgtttcaagatccggaccagcagttttgcatgctgaccgttgaagatgaaatcgccttcggcctggaaaatttgcaatatacaaaagaagatatggacgcaatcatcgatgacgttttagaaaaattagagatcactcatctgaaaacgcgaacgatcgcttcgctgtcaggcggttcaaaacaaaaagtggcgcttgcctgtatcattgcgatggaaccggaactcattattttggacgaaccgacggcacagcttgatccatattcggcacgtgaattagtgcggctgatcaaagatcttcaagcaaaaaaaggcttcggccttctcgttatcgaacatcagcttgatcactgggcgccgtggatggacaggacgattgtccttgacgaaacgggtcagaaggtgatggacggagagacggatgttatctttgaaacaaggattgaagagctgatacagctcggcattccgattccgcgtgtgatctcattgcaggagcacgtcagcattccttttacattgtgtaaagaaaatctgtttcacgaacctgtaccatctctgcccgaaccccggcccgccgcgctttcggcagaagacgcgctgagcgttcacgaactgtcattctcaagaggagcagaagtcatttttcaggatgtgagcttttccgtaaaaaaaggttcaatcaccgcgattgccggtcctaacggaacaggaaaatccacgctcctttctgccgcggccaagctcatccgtccgctgggcggagacatcaaaatagacggcagaccgattgattcctattctgaaaaagagctgcggcgacagatcggatatgttttccagaatcctgaacaccagtttgtcacagattccgtcattcaagagctgatgttcggttttgaaagcaacagagccgcaaaggagaaagctcttcagctgttaacccgattcggcatgagacgccatgcctcacagcatccgttttctttaagccaaggacaaaaacgcaggctcagcgtcgcgacgatgcttatgcacaatgtgaacgttttgatgcttgatgaaccgactttcggacaggatgccaaaacggcgcgggagtgtatgcaaatgctccgtgagattcaaaaggaaggaacggctgttttgatggtgacacacgatatggaactcgtctcggattatgccgacacgatccttgtgctctgcggcacgaagctggtgtaccgcggaacgcccgactcattgttttctgatcatatcggaatcgcggagcgggcgcatttagctttgcccctgcggtatgaatggatgaaacacgacaggaggcggaaaaatgaacttgcggctggaggctgttaacccgtcaataaaggcggcggctgtattgttatgcgtcattatgctgtcatttatttataatccgtacacccctgctttgttttatatcatcattgcgggaggcgtcctctcggcggggcgtgtgccgctgaaaaaatggctgctgttcacgattccgtttgtcattctggccttcggttctttatggacagccgccgtattcggaaacgtcccgacaaccgggagcaatctgctgtttaaactcgggccgattgccgtcaacagtgataacgcggcgctcgggatttctatcgcgtttcgtattttatgtttttccgctttgtcgatgatgtttctttttacaaccgatccgattctgttcatgctcagtctgattcagcagtgtaagctgccgcccaagcttgcatacggcgttatcgcgggattccggtttctccctcttctgaaagatgaaatcctgatcatccggcaggcgcacagaatcaggggtgcggcgtctgattccgggctgaaaggaaagctctccgccttcaggcgcttcaccattccgctattggcaggcgcaatcagaaaggcggaacgcacggccatcgcgatggaatctaaaggctttactgggagccgaaaccgcacgttttacagaactgttactgtgcgccgcgccgactggtgctttttcctgctcgtgcttctgttattcggcgcaagctggctcatttcattgttgtttgtataaaaacaggccgccggagtgattcggcagcctgttttgttatgtatgttattgatgataattgagagcctgagcgagattggacttgaccgtaatctctgagaaattaatgccgagctgtacggcggtttgagcaatttccggcctgattccggataaagtggacgtgacgccgatcaatttcagcgcttcaattaatttaaaaatctgatgcgccaccatcgtatcgacaaccactacacccgacaggtcaattaacagatgttcaatcagccgttttgcacatgtgctcagcgtattttcaagaatgaatttggcgcgctccgtgtcaatatcgccgacaagcggcagcagcgccgtccgtttgctcagcgtgataaccggcgagcttaactccaaaatcatttctctttgcgcattcagctgcatttttgagttatgctcagcatgatcgacaaacgtgtaaatcgtaaaatcaaatacttgtgcaattaaattctcccatttcttcctttctccctcggcaaacgaagattcatgtttatcggcaaacgcatcataataactgatgtatagtctccggtttctcatgaattcacggaccacatactggacgggagtatccagatgcttctggtctttcgcaagctcaatcacccaccgctcgaattcttctaaaaattctttttccggcatgatatacattttattaatatgccggtaaaattctttatcctgctccgtcagttcttctgtgatgacgggatttgtcaaagaataaatcgaattcggatccgaatcttccatcgtttcgatccactctttcgcaatttgatccacttgttctgaaaaatagctgtataacgcttcatttatcttcatctctcttctcctttcccatttccaattatagcgtcagcgggtcatgaatgaaaatgaaagctgtcaaactatccatttatttgaaattttttagtccgatagattacgccttttttatgaaaatgcttcaaatgactctttccggccggcatgctctgccataaaatagtagcaacacccttgtatccactggcaagcataaaaaaggagggcttttttatgaatggtgaaatgcatttgattccttatgtcacggatgaacagatcatggatgtgaacgagcttcctgaggggattaaagtgattaaggcgccagagttgtgggcaaaagggtttaaaggcaaggatattaaaatcgcggtccttgacacaggctgcgacatcaatcatcctgatttgaaagaccggattgtcggcgggaaaaacttcaccgatgatgacggaggcaaagaagacgtgatttccgattacaacggacacgggacacacgtttccggaacgattgcagccaatgattcaaacggcggaatttcgggtgtcgcgccggaagcaagccttttaatcgttaaagttctcggcgggaaaaacggcagcggcaaatacgaatggatcattaacggcatcaactacgccgttgaacaaaaggcggacattatttccatgtcactcggcgggccaagcgatgtgcctgaactgaaagaagcggtcacaaatgcggtaaaaagcggtgttctggtcgtttgcgcggcaggaaacgaaggcgacggagacgagcgtacagaggaactgtcgtatccggccgcttacaacgaagtgatcgcagtcggatcagtctcaatcgcccgtaaatcgtctgaattttcaaacgctaataaagagattgacctggtggctccgggagaaaatattctctccacccttcccaaccataaatacgggaagctgacgggcacttcaatggccgccccgcatgtgagcggtgcgcttgccttaataaaagggcttgaacaggacgcgtttcagcggacgctttctgaggctgaagtctacgcccagctcgtgcggcggacccttcctttggacatcgccaaaacattggccgggaacggatttctgtatttagacgcgcctgaagtgctgatggaaagagccgaacaggcacagctgctgtctttctgatatttttctcgtataatgattgatcagtttgtcacatcaccaatttttaaattgtgagattttctattgacagtgatctgaataagctgataagataaccaacaaatgatgtaacttttcaaaaaaattgaaatactttctcttatcgagagttgggcgagggattggccttttgaccccaacagcaaccgaccgtaattccattgtgaaatggggcgcgtgatttttgcgccgagacgattgtctcataaggcacggtgctaattccatcagacgtgatctgagagataagagaggcttgcattttgaagttaaagcctctttctctcatgagaaagaggcttttttgttacatctcacttaaaggaggagacttaatgacaacaatcaaaacttcgaacctcggttttccgagaatcggcttgaacagagaatggaaaaaagcacttgaggcttattggaaaggaaacactgataaagaaacgtttcttaaagagcttgacggtttattcttatcagctgtcaaaacacagcttgaccaacatatcgatatcgtgccggtctctgatttcactcattatgatcatgtgcttgataccgccgtcagctttaactggattccggaaagattccgcagcatcacggatcccgttgatacatactttgcgattgcccgcggtgtaaaagacgccgtttccagtgaaatgacgaaatggttcaataccaactaccattacatcgttcctgaatatgacgaaagcattgaattccgtctgacgagaaacaaacagcttgacgactaccgccggatcaaagaagaattcggagcggaaacgaaacctgtcatcgtcggtccgtatacattcgtcacgcttgcgaaaggatacgaagaatcagaagcgaaagcgattcaaaaacgccttgttcctctttatgtgcagctgctgaaagagcttgaagcagaaggcgtcaaatgggttcagattgatgagcctgcccttgtgacagcttcttctgaagatgtccgcgccgcaaaagacctctatgaatctattacaaaagagctttcaggactgaatgtcctcctgcagacatactttgattcagttgatgcatatgaagaactcgtttcttatcccgtacagggaatcggacttgatttcgtgcatgataaaggcagaaaccttgagcaattgaaaaagcacggcttcccgaaagataaagtgctggcagccggtgtggtcgacggccggaacatttggaaaatcgatgtagaagaacgccttgatgcggctttggatatcctcagccacgctgatgttgaggagttatggattcagccttcaagcagccttctgcacgtgccggtggcgaaacaccctgacgagcatcttgaaaaggatttgctgaacggcctgtcatacgctaaagaaaaactggcggaactcggcgtcttaaaagaagggcttctgtccggcaaagcggccgtcagtgagcagatcgaagaatcaaaatcggcacttaaggctttaaaagcattcgcaacaggagcgaactccgctcaaaaagaagagctgaatcagctgacggaaaaagatttctcccgtccggcaagctttgaagaacgattggcgctgcagaatgaatcactcggtcttccccttctgccgacgacgacaatcggaagcttccctcaatctgccgaggtgcggagcgcacggcaaaaatggcggaaaaaagattggacggatgaacagtaccaagcctttattaatgcggaaacgaagcgctgggttgacattcaggaagaaatcggcttagacgtgctcgttcacggagaatttgagcggacggacatggtggaatacttcggtgaaaagctggccggattcgcctttacgaaatatgcatgggtccagtcttacggttcacgctgcgtacgtccgcctgtcattttcggagatgtcgaatttatcgaaccgatgacggtaaaagatacggtctacgcccaatcgctgacggaaaaacatatgaaaggcatgctgacgggacctgtcaccatcttaaactggtcattcccgcgtgtggatatttcaagaaaagaaatcgccttccagatcgggcttgccctcagaaaagaagtaaaagcgcttgaagatgccggtattcagattatccaagtggatgaacccgcgctccgcgaaggactgccgttaaaaacgcaggattgggatgaatatttaacttgggccgcagaagcattccggttaacgacgtcttctgtgcaaaatgagacgcagattcatacgcatatgtgttacagcaactttgaagatatcgtagatacgatcaatgatcttgacgcggatgtcattacaatcgaacacagcagaagccacggaggatttttagagtacctgaaagaacatccttacgtgaaaggcctcggactcggtgtatacgacattcacagcccgcgtgtgccggcaactgaagaaatctatcaaattattgatgacgcgcttgaggtgtgtccgactgaccgcttctgggtaaacccggactgcggactgaaaacaagacagcaggaagaaaccgttgcggcattaaaaaatatggtcgacgccgcgaaacaggcacgaaaaaaacaagctcagcttgtataatgaaaacagccatccgtaaattgcgggtggctgttttttctgggcatgctacttattctgcagcgcttctgccagttcatacaatgaatcatactgcttaatttgatagccccgcccctctttttgcaaataccctttttggcagaattgcgtcagcacatgcaagagatgacggtaagatacacccaaataatcacagaccgttacgtgcttctctttataaacccctttataagccgtctgcaaaataaaatcagcaagccggttttcaagcgggaacgccagactttgtgaatatttcgaagccataagcgttgccttagcacttaaaaacttagccagctcacgcaggaatttcgcatcctgcagcaattgcacgcggcagcggtaaataggcagaacaaaacaaacagtcttcgctgaggcttgaattccttttgtgtaatacacttcatgtaatagttccatctctccgatgtaatcatttttgttgataaaattaattaaagaaactttcccgttttggtgggttacatatattttcgcttttccttcaatcacgtaaaacaggaagtctggcctcctgccctcttgaataatccattcgtcccgctcatattcgcgcacttccataaactcttcagcggggaaagagaataaatgcgcgattgagtgtttttctaactgatgccgctttttctcgcctttataaatttccatcgtccaccccaaaaatatgagatatctcatattgtctttatgtccttacatgataacatgccaattaaaggaggaacgggaatgaaagcatatcgctggatgagtctgcatttttttagtttttttatgacatggggtgtttttctgccctattggacgggatggatggtgcatataaaaggggtttccgtatccgaagccagtttcattatgagtctgggcctggcggcaagagggatttccacattatttttcttcccttatttatcaggaaaattcagcagcaaagccttattaaacggcgccagaatcgggacgcttctcgcacttttatgttatattccggctgattcttttcaaagcctgcttcttgtcacattagtgctgcatgtgttttacccggctttaatgcctgctttagacagcgcttgcggcgtccttgtacagcataacgaattaaaggcttatgggactagccgacagtggggatccgcgggttttgtttcagccggcgtcatcctgtccgtctttacaggtatattcggagatcaagcgattttatgggcactgcttttgggcgccctgatattcgcatccctaagctttatgcatgcgccagctgttctttcaaaacggccggaaacagaccgtgcaagaaaagagggcatgtttgccttattccgcatcaaatatttcggtctggtgctcgcaatcgttatcttactgcaggcggcacatgcatcttactacaattacggttatctctttttgcaggaaatcgatgcgcccgcatatgccatcggaatcatcatcaacatcgccgttatcacggagattatcttctttgcaatcgctgaccgatactttcatcaatttacggcaggctctttgctcgccctggcggcgcttggtgctaccgtacgctggatactcgtatttgcctttccgcatgtcatcattttctgtcttgcgcagacgctgcatgcctgttcattcgcgatgggacactatgcatttatgaaatacttaattaaaaatatttcacccgcgcaaatcccgaaagcccaaggtatatattcagcgcttgctctcagctggagcactgcggtatttactattttcggaggttttttatatgaaattgaaccccggtatgcctttatcggaatgattgtttgtacgataccgtccatgcttctcgcccttttatacagaaaacttgaaatgaaaaagagcgtttttgcaggaaacgcacaagatatatagccatcgctttatagacgatcacatgtcccgctgtcattttgaccgattttgtgaatgctgtgcgatgtattttctctatatttaaagtatttccttcatatatgatgaaattaatgaagggaattcgttcagaaacttggacagaatcagtgaatataatgatacagtactgcttacgctcatttgggggaactttgttcgcaataaaatgattttcagccaactcataaggagggacattgtgtcacagcctaatatgcccaatatcacccctgtcgttacactttccagagacgataccattaaccttcttctttcgtcaattgctatggaagagctgggaatggcacatattctgaatgcggaaggggaaaaaatccaatacgcgctcggaacgattcccggattaacaggacccccgtcaagtcttgcggatattcttaacctgaatgagagcgtccgggatacgcttgacagcttaatgaaacaggagctccttctcggttcaaaattggacagtatctcaaatatccctacattggcgggaccgacgggggccacggggccgacgggggccacgggtgcgggtcttcaagggattgttgcttttaatccgctgatcgcccctacttacacgaccggacaggttgtcttgtataacggcagctcttatgtcgcaaacgtaaacagcccgtcgggaacccctgaaacctcagctgactatacacttttagctgcggcgggaagcaccggcgctactggttcaaccgggcggaccggaattaccggggctactggcggcactggatcaactggaattaccggcgttacaggaccgaccggagttaccggggctaccggcattacagggcctccgggaagcaccggaacaagtctgacagccacttccggctatgcgagcaatacgggcggcggtgttgtcgcagttattaacggcggcacggccatttccttaccgaatgaacaaaacctctcagcggatattaccgctaatgccgcaaatactgtattcaccgttgctccggcaggacggtactatatttcctaccatattaatttaacggccggcctgctagtaagttcgcgcatcttaatcaacggcactccggctgcaagttcgattattgctccggtcgcgtctttggcaaacttcaataactcctttattgtgactttgacagcaggcagcaccattcagctccagctgttcggattattgggtgcggccacattgcttagaggaagtgccggcgcagctttaaacattattcgattatcttaatggaacatgcaaaaaaaggatcaggcgtttgtccgctgatccttttttaattgagacagaagttcttgcgcgggtttaaattgcggattgaatttcacggattttttggcgtaagcgatggccgtcatatcatggtttaatgcagcatggcatttcgccatataataaaaagctctgaaatcggcggcaccttttaaaatgaagtgatcagcgttttctccttcaacctgcgttccggcttcaaatgctttgattgccgctctgtacttttccaaatgatataatacaaggcctttataataatgaagattgctgtaatcaggataaagcttgagcactttttcaatcccttgttcggcttcttcatatcgcttgagctcaagcaatattgtatattttagaaaatacagaagagacggaggcattcgtttctcacttaaaaattgaaatattgagccgttgacaagatgtaatgctttttcatagtcttttattctgtaacattcacttgccagatgatagactagccacggatcaggattttcctctgaaagttcttcatttaatatgctgatattccgtttatgtttttgtttgattttttcttcctgctccaagtagccgtagtgatgaatcacacatgggagcgtgaaaaaagcattgttttcttcctcattgggagccgagatattctcgtgaattctgccttgatacagaaggcctttatgattgcggaacagcctcggctgcatgctttcaaacgcttcgttttcatcgagctgcttccccgtataattgatgattttcaaaagtccccggctcggtaatccgtcatgaagcagagaagttaaaaaacggcccgtctcctgatcgagctcttcatccgcgtcaagcactaaaatccaatccccttcggcatgctgcagggcgtaatttctggcctttgcgaaatcattctcccattcgaaatcaaacactcttgcctgaaagcttttacatatatcttttgtattatcttgtgatccggtgtctgcgatgacgatctcatcagcgatgtcttgtacacttgataaacaacgggagatatatctctcctcgtttttcacaatcatgcaaagagtcagtttacattcagcatttccgctcattttctcacctttcccgattttggagttgttgattgaaccaaggccgtccaggagtgccgttcatcgttatgatgacaggccgcacccatctgacggcaggttcggcagttgattctgcatcccattcctgaagctgcctgacagcccgcttcgtaatgggatgcgcccggaattcgcgcgggctttcacaaatgaattttttcgttcgttccgtcactgtcttcatttcatgaaagtgccgcgcatacatctgcttctgttcttcttccaagctgatcattaaaaacagccggccgcccgtttccatctgccagcggcacaatgcggagaacagcctgatttcttctttgtaatttgaaccccttcttttatccacggtcacagataatatatttaacagcgccatcgtgagacaatgcaaggcttcaaaagatgtctgtttcgcttttgagatgctcggatacggcatatgcttcacccgtctctttttttatgaacgctccccgccttttttcttccaatcgcagtcctcacaatccccgcactcacagcagccaatacggccgtaaaacaggtcgtcacacggatcttccggatcactgggatcgtccggattccacgggtcatcaggatcgcccggatcactcggattacttgggtcgtccggattccacgggtcatcaggatcaccgggatcactcggattacttgggtcgtccggattccacgggtcatcaggatcgcctggatcactcggattacttggatcgtccgggtctatacaggcttcagcatcctgtaagtagataatgtcttcaagcttcgtctgcaaaaggagttgtgatttcatgacggtgcgcaggagccgttcagtgcttctattgattgatgataattcccctaaggagggatcgccggaagcgctgagaaacatttgaatcctttccgcttccgcctgcagaatatgggatagtccgatttcttccatagccacggatgaaagaaggaggttcagggtctcacatctggagagtgtaatgtcgggggtgatgttcggtatgtttggaagagtcatcgatttctccctcttttctcttggtgtcattatgcaaaagtgctatatcgtattcttattccgggagagaagagatcattactgatgttttcgttaataaaatatcccggatatgaaatccgggatattcgttcgtttctttatttcaattcaagtttgacgtctacatttcctcttgttgcttttgaatacggacagaactcgtgagcggcgtgcaccagcttctccgccgtttctttatcaagatcttttgtatcaatgacgagcgttacgccgattttgtaacccccgtcactctcatcttttaaaaggctgacctgtccttcaatttcagaggtcatgtcgattttttgtttttgggcggcgagttcaagcgctcccccgaagcaggcagcatatcctgccgcaaagagctgttcagggtttgtgccggtttctccgtctttttttgcattcggcatgatgatgtcaaaatccagcaccccgtcttcggatttaatatgtcctgctcgtccgccgactgcggtcgcttttgaagtaaataatgccattattatcagcctcctcattgtacttactgtatatattgcccctgctcatatttttaaacatgattgcaataggaaatgggccgtttttcggctacaataggggtaacgttaacaaaaaagagttggtgaaagaatggcagaaaaagattttgaacatatgaaactggagaatcagctttgttttttgctgtacgcaagctcaagggaaatgacgaaacggtacaaaccgctgcttgataagctcaacgtaacttatccccagtatttggcgctgcttttattatgggagcacgaagaactgaatgtgaaacggatgggtgagcttttgcacctggattccggaacgctgacaccgatgctgaaacggatggagcagcacggaatcatcatgagaaagcggtcggctgaagacgagcgatccgtgacgatcaggctcacagatgaaggacgggccttgcagaatacagcggcagatatccccattgccatgctggaacagacgggactgtcaaaagaggaattaaagcaggtaaaacagtcgctttatgaggttttgaaaacgctgcacggcaaaaaataaggatgccccgaatgggcatccttatttttattctgctgccagaagcttcacttcaatatttcccgctgtcgcttttgaatacgggcacacaccgtgcgctttttggataagggcttcaagctcctgtttctcaatgccggatgctttgacctcaagggtaacgccgagtttatatccttggtcgctttcatctttcagcagactgacatgcgcagtgacctctgtttcaatactcagacgctcttttcttgctacgagttgaagagcgctgtcaaagcaggctgaatatcctgcggcaaacagctgttcagggtttgtggcttgttcgagcttttttgctcttggcgttcccggcatggcaacatcaagattcagcaccccgtcagaagacgtgactttcccttcacgtccgcctgcggctgaaacggttgcagtaaataatggttttgtcatataaattcacctctattatattgtgtacaatttaattttacgaaatataatggaaaccgtcaatctttccgcataaaaaaagcttaccctttttgaaggataagcttaaaagattatacccggatttgtccgtttcctttgatgatgatttttgtagatgttaacgccggaagtcccatcggccctctcgcgtgaagcttttgcgtgctgatgccgatctcggctccgtatccgaattcaaaaccgtccgtaaaccgggttgaagcattatgatacacggcggcggcgtcaacggcggtctggaagtaagccgcatgctcggcgttctccgtcagaatggcttctgaatggtttgtgccgtactgctgaatgtggcggaccgcctcctgtacgtcctgcaccgtttttacactgagaataggcgccaggtactccgctccccaatcggcttcttctgcttgtttcgcttgaggctccagtccgcaaatcacctggtctcctcggagctccacccctttttctgtcagctgattcagcagctttcgtccgtgttcttcggcccatttttcatgaatcagaagagattcaatcgcattgcagaccgaaggacgctgtgttttggcgttgatgacgacctcgcttgccataaggggatctgctgactcatctatgtacacgtggcaattgcccgctccggtttctaaaacgggtacggttgattccctgaccacaagatcaattaaatttttaccgccgcgcgggatcaatacatccagcccatcatttaatgtaaagagctgtttggcggtttctttgcttgtatcttcgatgagctgaacggcatcaatcggaagctttgacagcccaagtgcgcgtttcatcacactgacaagcgctatgttgctgtggatggcggaagaacttcctctgagcacaaccgcgtttccggttttcagacagagtgtggccgcgtctacggtaacgttcggtctggcctcatagatcatgcccactactccgaggggcacgcggatcttttcaattgataatccattctcttttttaatggtctccaatgattcaccgacgggatcttcaagaccgattagcagttccacggcgtccgcgatatcgagcaggcgtttttcatcaagcgtcagcctgtcaataatgtcaggtgtcaatcctctgttccgtcccgcttcaatatctttctgattctctgttaaaatcagctgccgttcatttctgagtccgtctgcaatacattggagcgcttcgtttttttcagccgtcgttttcatgaccatttcggcagccgcttcttttgccaaagccgctttttgcaatacttcactcatttgtgttcccccttgtcaaataaattcacccaatcatctctgtgaatcacttccacctgcttcgttcctgaaagctggtcgctccgcttccctttggcttctaaaatttcatcggatgagtactgtgtctgccctttgccgataatgccgccgggccctctgacttccactacggctcctttcggaaaactgccgcagacatcggcgacgccggccgggaggagacttgacccgttatggatcatcgcctgctccgctcccccatcaatgatgatttcccctgatatcggagaatgaaacatgatccattgccgtgtattattcactgaggacaggtctttatcgccgatataagtgccgtcgccttttccgtttaaaatcaccatcagtttttcacgtccggagccggttccgataaacaccttcaccccgagcgacaatgcggtctgggcggcgagaagttttgacttcatgcctccggtgccgacctttgagcctgctgacccggcatatccgagcaattcaggtgtgatgtcattcagatagtcaaaccgctttgcgtccgggttttcattcggattggcatcgtacagcccgttaatgtctgtgagaatcattaattggtctgcatgaatcaaaccgcttacaagcgccgacagcatgtcgttatcaccgaacgtcagctcttcgactgatgtggaatcattctcattaataatcggcacgacgccgcgctccaacagttccattacagtggcataggcatttctgtaccgctctctttttgagaaatcatttcttgttaataaaatttgtgccggcgtcagaccgtatccttttaaatggtccatatattgctgcattaaaagcgtctggccgactgcggcagctgcctgttttccttttatcgtaacgggtcgcgacggatagccgagagcggaaaaacccgctgccaccgcgcctgaggtaatgaggatcacttcatgcccgttttcttttaataaagaaatggcttccgtatgttccttgatttttgcttcatcaatacttccgttactgttggtgagcgagctgctcccgattttcacaacaattctttgttttttcatcgtttctcctccgtggcaatcaatccaaaccggctctcgtcaataaaaaaagcccattccgtcctgaaaaataaggacgaaatgggctttccgtggtaccaccttgtttgaacgcgtttttcacgcgtcccgctttcctgtaacgccaggtatcgcgcctgagttttcccctcaggactccaaggcaggttcggcaggtttcatgcggcaaaatgtttcagcgggccattttgctctctgtcacagaaagttctgcgtactgatcctcttcaacgctcaatgatttttttatattatgcaaagaaaacaggttcttgtcaagacattttcatccataaaaaacagcccgcctccccggcggaccgtcattaattaaatacgatcgttttgtttccgtgaacgatgacacggtcttccagatgccattttacggctcttgccaacacgctccgctcaatcgttctgccgatattcttcagatcctctgcgtgatctctgtgatcgacgcgttcaatatcctgttcaataatcggcccttcgtcaagatcgtccgtcacatagtgagaggtcgcgccgattaatttcactccgcgctcataagcccgtttatacggattagcgccgataaaggccggcagaaatgaatggtggatgttaataatccgattcggatgggcagatacaaaatcagacgtcaaaatctgcatgtagcgggcaagaacgatcacatcaatcttatactgctccagcagctcaagctggcgccgctcaacttcggcgcggatatctttgttagctttcatgtaatggaatggaatattcagcggctcgaccacttctttcgcctcttcatggttgctgatgacgaccgcaatttcggccatcatattgccgctttgccattcccaaatcagttcatgaaggcagtgcagctctttggatacaaagatcgccactcgcttcagctcacttgccagagagaggctccatgtcatgccgaatgtctgggcgattgaggcgaacgcctgctgtaaatcctcttttttctcacgaatgcccttgcagtcgaattcgatcctgagaaaaaaacgtccgccttcagggtcagtcgtatattgatttgattcaataatatttgcgccgtgttcaaacaaaaacgcggaaacagccgatacaattcccggctgatcggggcagctgacaagcaggcgccctttttcctcattaccgcggcggtattctttcagccgctgtgtcatatatgaattcatctgttttaatccctcgtatcttcataattcgtaacttattatagattatactgaaaatttgataaaaatcaatttacgaaagaattttcagccctacggctgcgcacaaaataagcgcaatgaaaaagatgcgcttcgcatccttctgctcgccgtagaaaagaatgccggctagtgcgccgcccgccgtgccgataccggtccagatcgcataggccgtgcccatcgcaatcgtctccatcgcataagaaagcagggaaaaagaagccgcaaatccgacgataatgaaaaaaatccacttgactttcttttctttttgaaattgattcattaaaatgaccccgagcatttcacaaagacccgcggctatcaggctgatccaatgcattacgccttctcctccttcgtctcaggcttatcctgtgtgaccagctttaatccgatgacaccgatcagcaaaacgccgatcagcacgatttttaccggatcggcctgttctttgaaaagcaggatttcactgagcacggtgcccgctgtcccgagtccggtaaagaccgcatataccgttcctacgggcaggctgtccgtcgccttgattaatagataaaaactgatgatgattcccgtaatcgtgccgccccacgtcagtgccgaatcagcatgtttcaggccggtgacccataccacttcaaatacggccgctatgaccactaaaccccatttcatgttcttcatcctttctgtttccgggcaatacaaaaagcccggaatagtcgtctcacatgagattgactctcccgggcttttttccctccgtgtgcatatgcgggatatgtccgcatatgtgttttctctcggaccaggccatgtatgaacatgcggaaccctagaaaacatgtctgttcgtatcatactacatttcgccgaaacgttcaacgtcagatgtgatgtcaaataccgtcagccgcctctcccatttggtaacggtctcaccgggcaccatgccgattttttccgcgacgcggacggaggcagcattttccggatcaatcagcgccgctatgcgtccgtattgctgcgtatgaaaaccgtagtccagacaggcgttcgccgcctctgtcgcatagccgcagccccagcggcagcgggcaaacatatagccgatttccatcaaagtgtttccgcttatcgtctgcggaacgattccgcattgaccgagaaatgcacccgacactttatcctctgcgatccaaagactgacgccgtatcctgcggccaatcgtttgttccaggcaatccattccttcgtttcccgtctgcttttaagagaaggataatatttcatgacctctctgtcggtaaacagcccgtacaaattgtcttcatcgtcatcccgcatagtccgcagacggatacgcccggttgtcaggatggtgccggaagacttatgtttcatcatgcacgccacgtctcctttccctgtaataaattatggacccggcaggaaaagtcctttttcagcataaaaaaaccgcttttaaaaaaagcggtttgacgattaccaaggtttatctgttccgagcgcctcggccagggccttgctgtgttttaagcggttttttcgttctccggcgcgctgaacggccgtattgtgaagcatgatttcttcctcggtttccggcacgatccgcggaacgggcaccgatttcccgtttgaatcgagcgcgacgaatgtcagaaacgacgttgccgcaagctcgcgttcacccgtcatcagatgttctttaatgactttgacaaacacctccatagacgatgtgccgacccatgtgacgtaggattcaagacatacggaatcctgttggccgatcgggcgcaaaaaatccacagaatccattgaggccgtgactgtttcacaccggcagtggcgggccgcggaaattgaagcgatatcatcaatatagctcatcagctttccgccaaacagcgtattgtgattattcgtatcaagcggaaaaaccctgcttgtcttgacaacccttgtttctttgcaaaatcttgattctggcaacttcatattatttaaactcccctttggtgtctggtcgttttgacatttcatctgtaccctattaaacaatactttgatcgttttgtctaaaattttaaatattaagttggttagatattctatcagaaatgtttcattatttatcacatccgggaataataaacgcacattgaataccgataggaggatatcacatggacgtatccatacccaaatccacgcggaaaccggcttgccgcagtgagtttgatgctttgcagacagtcatcttatgccggccggaacacatgaccatcaaggatattattaacggaacgcagaaacatttcaaacaagaaaatattaacatacccgttgccctcaaacagcatagtgagtttattgacattttaagatctcatcagattgaagtcgtcctgctgcctgccgatcccgctttgcctgagcaggtattcacccgggatatcggatttgtcttaggcgagacagcgtttatttcaaacatggcggcttcagtccggcagggagaagaaaaagtgtttcaagacctgcttgacgataagaaaatcccttatacgcgactgaaaaaagcgaacattgaaggcggcgacatcttgatcgcagacggcaccgtttacgccgggctgagcaagcgtacggataaagcggctgtccgggagctgcgggaggcgctgccggagatgactgttgtgccgatccctctcaaggaggatttcttacatttggactgtgtatttaatatgatctcggaaacggaagcgctatactgtaaaaatggcttgcggcagaaagaaattgatcttctcgccgaacgttttgagatgatagaagtgcctgaagaagagcaattcacgctcggcccgaatatcctgtcaatcggcaatcagacaattatcagcctgccgcagcaccgtcatacgaaccgcgagctcagaaaaaggggttatacggtcattgaaaccgagttttccgaaattatcaaatcaggcggttccttccgctgctgcaccttgccgcttgccagaacatcttaaacatttacaaggcagtttccttcaagatacgttaatatagagaagacaagactctaaagggggaaaccgaatggctaagtacataggatacgcgggaacatatacaaaaggcggaagcgaaggcatttattgttttgaacttgatacagaagcgaaaaggctcagccggccgaagctggcagcaaagctcggcaacccgacatacgtcactccgaattctgataacagcatgctgtattccattgaaaaagcagacggaaaaggcggcgtcgcagcctatcagattcatcagaacagcggggaattaacgtttgtaaaccaccagctgattgaaggcccgtctccatgccacgtcagcattgatgataaacatgaatatgtgttaaccgctaattaccacagcggaaaagtgcacgcctttcccgtcaatgaggacggaagtctgcaggagccggctgccgaagccgctcatacgggaacaggtcctcatgaaagacaagagaaaccgcatacccatttcgctggctatacacctgagcataactacattgcagccgtcgatttagggacggatacgctgtatacgtaccaaatgaaaaacggttcgctcacagaggtgaaaactcactctttcgcaccgggttcagggccgcgccacatcgttttccatccggcggaaaaatacgcctatgtcatgacggaaatcagcaatgaagtcatcgcgcttgaatacaacccgaccttaggtgaattcagagagctgcaggtcatttccgctttgcctgaaggctttacggacaaatcgcaaggcagcgcaatccgcatatctaaagacggcagatttctttatgccgccaaccgcggacatgacagcatcgccatctttaagatcaaccaatattccggtgaattgtctcttattgaatgggtgccgacagaaggcaactggccgcgtgatttcgcgtttgacccttccgagacattccttgtcgcgtcaaacgaagaaacgggaaatctggttttgtttgaacgtgatccggaaacaggcaaattgactctgcttcaatccgacattccggttccgtatccggtctgcgtgtcatttctgcatcagatttaatcaaaaagaaagctgactttatattgtcagctttcttttttgtataaatggcaggcgacaaaacgccccgccttcacttcttcaagctcaggcgttatcttaccgcagagctccatcgcttcagggcaccgcgtcctgaatacacagccgctcggcgggttaagggggctcggcagctcccctttcagaataatccgttcacgcttgtcctcaagaagcggatcaggaatcgggattgaggataaaagcgccttcgtataagggtgaagcggttcccggtaaagcgcagcgctttctgtaatttccatcatgcggcccaaatacatcacgccgatccggtcgctgatatgcttgaccattgataaatcgtgggcgataaataaaaatgtcagccctttctctttctgaagcctttttaataggttgacgacctgagcctgtaccgacacatccagcgcggaaatcggctcatccgccacgataaattcgggatgcagagagagcgctctggcaatcccgattctttgcctctgtccgccgctgaattcgtggggataccggctgccgaaatccggatggagcccgacagcttcaagcagttcatccgccatcatcatacgggcttttcttgtattgtaaagattgtggatttccatcggctccataataatttcccttacggtcagacgcggatttaacgaggcgtaagggtcttggaaaatcatctgcagcttgcggaagaagaccgaccgctgttcggccgcggcacggtgtatatccgtcccttcatatgataccgaaccggccgtcgggtcatacagacggagaataactcttccgagcgtcgatttaccgcatcccgattctccgacaagtccgaatgtttcccctcttttaatgtgaaagctgacaccgtcgactgcttttacggctttctttcttcctgcgtcaaaatgcattttcagcccgctgacttcaaggagcggagatgccgtcattttctattcccccttttcgcttatacagcggcgtacggtgcataattctttttcatagatcgttccttccaaggacagcacttcgattgtttttcccgttttcggggagtgcagcattcggccgtctcccagcgccaaaccgacatggtgaatcgcgccttttccttcttcataggcgaaaaacaaaaggtcagccggccggatatcgtttaccgccgcgccgcacccggcttttgcttggtcctttgcatcacggggaagggtatagccgtttgctttaaatatcgaatacataaacccggaacagtcaaacccgaaaccgctcagtcctccccataagtacggaagcccgagaaacatcatgcccgtttcgatgacctcggccgcccgtccttccgtatgccggcactcgtctgcgtcagcttcatttacgaaccgttctccgagaggcgtcacaacccgaaaaaagcctttctcacgtcctgatgccggaagacgcgttaagaaacttacttccaagtccggttcgccgttagtgtgatataaaaaagctgtcggtttggtaatccatacggcgggcgaagatgaaaaaaagccgtcttttgaaagctggcttttttttatccagcccggatatccgcgcgcatccttgtttgagggctggccgggaacggcgacaaaagcccattccccttcctctttgagaatgatcacctcttccccgaaaagcgcttgcgtttggacaaggttgtctgtgcataattgcagccgctcttcatatcccatagacgctaaccattttctgatctgcggcgggttttcaagcatcggcgcatcatacgaacggggagatgacggcatcgtccatacgttggctgccgccgctgtaacggctgctctcatcttttcgcctcctcttgtttcgacaccccggtaatgccgagacccggttcatcgggaatcgtaatctgactgccgctgtatgtgatgccgcctttaatcaaatcatctttcagcataagcggcgcatcaaaatcaaaccttgtcacattccgtttgcccgcggcaaaatgagccgcggcggtgatgccgagcttggtctcaatcatgctgccgaccatgcattccacgccgcacgtttcggccatcgcattgattgtttccgcctgctttatgccgcccgctttcatcagcttaatattgattaaatcggcgcttctcgtctgcagcacgcaaaaggcctgacggggagtaaagacgctctcatccgccataatcggcgtgtctacggcatcggtgacctgcttcagcccggcgatatcgtctttatgaacaggctgctcgaccagctcaatgccgaggccggcgtcttccatctttcggatcgcagtcacggcttctttcggcgtccagccttggttggcgtccaatctcagtttgacgtttccgccgacacgtgatctgatcgcctgaatccgggcaacatcgtccgatatgtcacctatgccgacttttatctttaaaatatgaaatcctttgttcacatagcggtctgcatcccccgccatctcctcaggagaattgacgctgacggtaaaatctgtttccagtgtattccgatagcctccgagaagccggtaaagcggctgtccgtgcatttgcgcccatccgtcatatacagccatatccaccgcggcttttgcgctttgatttctttccaacagccggctgatatcatacaaaacagcttctatgccggaaaggctccgccccaagagagcgggcttcagcacatcgcggacggcgctttcaataccgtccgtgctgtcgcctgtaatgacaaccgtcggcggcgcctcgccccagccggtcagaccgttgtcaaatgtgagcttcacaatgaccgattcagcattgtaaaccgtgcgcaaagcggtcttaaacggctttttcagcggcacggacatccgtcccgtttgaatatctgtaatcctcacgcctgatcactcccttccggaaacccccgattcaatcgttaccgctttggccgccgtatccataaccgcgcgggctccgatcggaacggcgaagctcggtgaacaatggccgattttaaagcctttgagcgcgggcttccctgatttgacaatgtaatcgttcagcacttgctctaaagtaagcgacttttctttatgcttcggttcgcattggtgaaaatcacagaccagtattccggctgcgtctgacagttttccggccatctttaattgattcagcatcctgtcgatttgatacggctcctcatcaatatcctcgataaacagcaatttgtctttcgtatcaatttcaaacggcgtgccgagtgtggacgtaatgagcgacagattgccgcccgcaagctctccctcggcccttccgcctgtcagcacctccagcggagaaatgtcctccgtataggtgaattccgtttctgtaaaaagctgatgatacgacgcttttgtcaggggttcagcatcttcaagcccgacatccgtgctcagcatcgggccgtgaaatgtgacgagccccgtattttgatgaatggcggtatgtaaaaacgtaatatcgctgtatccccagaaaattttcggattgcggcggattaagccgaaatcgatgtcggcggcaatgcggcccgtgccgaatcctccgcacgcgcatatcaccgctttgacattctgatcactaaacatgtcatggagatcattgaggcgcgcccggtcttctcccgccaaatagccgtgacgggtcttcagcgcccggccgagtttcacttgaaggccaagctcattctctaaaaacagcagcgcggtttgcagcgtcccgctctcaggcgggcttgcgggtgcaatcacaccgaccgtgtcgcctttttgcagtgctttcggtttatggttcatgactttttcaatctcctttccggattgaaaagtgaaacacgccgctcctttaacggcaaaagagcggcatatgtttccgctgtaagatcaggacttttccgcccatttcagatcaatgtaaccgacggggtgccggacaatgcccttcacgccgctgttctgcagatgcacctgattgtaaaagtaaatcggaatgatcggagcctcgttcatgagcagcttttccgctttatgcatgagcgcaaaacgttttttggcatcggcttcctgttttgcctgcttgatgcagccgtcgtatgccgcgcttccccagccggtgcggttcatggaattatccgtttggaaagcctcaagaaaactgatcggatctgcgtaatccggtaaaaatgagctttgagagaactggaacttcagtcctttctgctcttctaaaaagacgttccattccatattggcgagcttaacgtctataccgagcacacttttgagcttctgctgaatcgcttccgctattttcttatgctccggttttgtgctgtatgtcaatgtaacggcgggcagcttgtcataatgctcttctgccatgcctttttccagcagttttttggcttctgattcatccggagttagtaaactgccgcccgcttcgcggaaatctttcccgtcaggctgagtaaatcccggggatacaaaggcatgtgccggcttttcactgtttttggtcacataatccgtgatttctttctgatcaatcgctgccgcgaacgcttttctgatcttttcattttgaaacggctccattttaacgttaaaacgatagaaatagagtccggcctgatcccacgtgcggacattttttcctcccatcagctgctcgctcagctctgccggcacaaaggcggtatccaaatcccccgactggaacatctgatagtcggtattccggtcactgaccatcgcccatgtcactttatccagtttcaccgtctttttatcccaatacgtctcgtttttgaccatcgtcatgctgtcgtcatgcttccattccgtcagtttgaacggcccgttgccgacaaaagtttttgcttcagtgaaccatttcgcatcagccttggcgaccttctcattaatcgggaaatacgccggattggacacgacgctcaaaaaataatcctgcggggccgccaatgtgacgacaagcgtttttttatcctttgccgtgactttcacgtcttcttttttgccttttccgctgttaaattcttctccgcctttgatcatatagccgagaaaagcggaagatgcgcccgttttcggatcgagcatccgcttccaggcgtacacgaagtcttccgccgtgacgggatcgccatttgtccattcggcgttatctcggatattgaaggtatatgtcagcttatcagcggacaccttccagctttccgccatggccggttcgggcttattatcttttccgagcctcgtcaatccttccatgatgttattcagcggctgccaggaaacattattaaatccgatcggcggatcaagtgaggtcggctcattttcgttattgagccgcagcaccgtctctcccccctgttcttttgctttgccgggttctgtccccgcctgttcattggctgtacagcccatcagagcaaacgaaacaacagcaatcacaccaatcgcccatctctttttcatttcaatccccctttttcctctgctgcagtcagctgctgcttcagccgctctgcacggtgatcctgaagccagcagctgacgatacggcttttggatttcacggttgttgccgggtataccttttcacagacgatcatcctgtccgggcagcgggcggcaaacgggcagcccggcggcggatcgaataaatcaggcggcgtcccgtcaatcggcgaaagctcactatcttccatatccagccgcggcactgaacgaagcagcccctttgtgtatggatgagccggacggtaaaaaatatcatgcctcgtgccgatttcggcgattttccccgcatacataacggcgactctgtcggcggtctgagcgacgacgccgagatcgtgggtgatcagaataatagacacgcctgtttttctttgaatcttcttaaataattcaaggatttgtgcttgaattgtcacatcaagagccgttgtcggttcatcggcgatcataatttccggctcgcagatcagagccatcgcgatcacgatccgctgccgcatgcccccgcttaattggtgggggtactgcttcaggcgggatttcgagtccgggataccgaccagatccagcatggcgagaacctcggattcagcttgttttcttgtcatggcgcggtgttccaacagcgcttctgagagctgatcccctatggtcaaagtcggattgagcgccgtcatcgggtcctgaaaaatcatagaaatatcgctcccccggattccccgcatttcccgatccgacattcggcaaaggtctttctgtttaaattgtatgcttccggattcaatctttgccgaatgtttcggaagaagacccatcacggcttgtgacgtcacgctttttccgcatcccgattcaccgacgatcgcaaacgtttcacctttatataaatcgaagctgacgcctcttacggcttttacagtgcctccgtatgttgaaaaagtaacatgcagattttgaacggaaagaacttgctgcgccatttttcctacctcctcagtttcgggtctaacgcgtcctgcaagccgtctccaagcacgttaaacgcgtacatcgttaaggaaatgaaaaaagcgggaaaaaacagccgccaccaatggcctgataaaatcgccggcagcccgtcatttgccatgactccccagcttgcaaacggcgcctgaatgccgagtccgagaaaacttaaaaatgattccgcaaaaatcgccgccggcaccgtcagcgtcatttggacaataatggctcccatcgtattcggcagcagatttttcttaatgatccgaaatgttttcgctccaaacgttttcgatgccaatacgtgttcatcatgcttcatcctcagcacctgccctctcacaatccgcgccatgccgacccatcccgtcactgtcagagcgacgataatggaactgagccccggccccatcagcaccattaacaaaatgacaacgagcagataaggcaaaccgtagagaacctcgatgattctcatcatggcgctgtctgtccggccccctttgtagcccgcgacgcctccgtagataacgccgatcaaaaagtcgatcagcgccgccatcacaccgacaaataaagagatcctcgctccgtaccacgttcttgtaaacacgtcccggccaagttcatcggttccgaaccagtgtgaaaaagaaggcggaagattctgctcggcgagcgtctgccttgtcacgctgtgcggtgatatcagcgggccgaacacagccgatagaaacaggcagcataatatcacaagtccggccatcgccaatttgttctttttaagccgccgccacgcatcctgactgtaagacaggctcggacgcttgaccgactcggtttcaccctttctttccgcgcccggctgaaaccagtcatcaggcacttctgtgtgttttaccgtttcttgcgggagattcatcaggatcaccctttcttatgaagttttatgcgcgggtctaacaggccgtatgccaaatcaaccagaaacagcaggacgatcagaatcacactgtaaaatacggtcgttcccatgatgaccgggtaatcgcgctgattgatgctttctacgaaatatttgcccattcccggtatggcaaaaattttctcgatgacgaaactgcccgttaaaatacttgcggcaagcgtcccgagtactgtcacaacaggcataagtgcgtttttcaatgcgtgtttgatcacaattttgacgggagaaagcccctttgcttttgccgtgcggatgtaatcctgagtcagcacttcggccatgcttgatcttgtcagccgcgcgataatggccatgggaccgacggcaagcgcaacagtcggcagaaccatgtgaacgggactcgtccaggtagctgccggaaaccatttcagatgaaccgcaaattgctgaatcagcagcgtagccattataaaattcggaatggaaatcccgagcaccgcaaggctcatggccgcataatcgagaaagccgccgcgcctgagagcggccgttatgccgagcgcgagtccggaaatcacagcgatgatgatcgccgttatcccaagctcgaaggagacgggaaatccgcgttcaagcatggcgtttacactgtctgacggttttttgattgaaggaccgaaatcaaaggtaagaatggattttagatagatggcgtattgagtgataagaggttcgttcagatggtagtaggattcaagatttcgctggaccgcttcgtttgtgccccgctcttcgttaaaaggcgagccgggtatcactttcatcatgacaaatgtcagagtggtgatgacgaggacggtcataatcatggcgataaaacgtttgataaaataccgcagcaatgccgttcacccctttaacagaatgttgttctcatagcgagttctgtcatgacgagcatggcctgataggcttccggcatgtcttttgcctgaaattgaacgattgtcgttcccgggatgatttctgtgcccggcattaaatgggcccattcagcctgtccgtaattggcaaattcaatgcctaatacaggtttttcaggcggagtcagcggtttgaccttatctttatttttgagcgcataggctgttttttccgtcaggagccgtccggctttttgaggggacaggcatttgaccgcggttcttgaaatggtttgtttgacggcggcagtcgtcacattcgggatcagctcctccgcctcttttgcggcgcaatcatctccggcagccatgatgaccgggacatcgtaaaatccggcgagataggcatttaaccccagttcaccgacaggcttatcatttatgtaaaagtggcggacgccgaatatcatgctgtgcgacatgacgcccggcatcgacgctctcgcatgatagccgataaacatcacacctgaatacgattcatcaagcccctgcatcatggaaaacggcttgacatcccccgtaatcagctctgcctcagggtgaagtttttccgcgagcagattattcatctttgagtggctgtcattcacggtcacttccgtgcatccgttattaaacgcttctgcgatgcaccagtttgcttcttcggtcatcagaaccctgccgcgctcataattgtgcatgctggaattgacaaatgtttcatcaggcagtccggaaatcccttccatatccacagatagatacagtttcatgtaatgcctccttttttatttaaaatttcgatattaaattatgaatattctaacaaattatattaaaaaaggatgaaacatgcaatataccattctgccattatgggaaaaaacaaacccttttcaccgggaaaagggtttgctgatagaaaaagttacataccgtttttgtttatagggtgaccccgaaactgtctgaccgcacttctgtattcgcgatcgggaatgacctgatgcctgatcggtccaggagcctgcggcgaaggcttttcatccgcctgcttacggacggcatgcggtttatgcgccagcttatgtcccatgccggtcgcattcatgacaaatgataaacacactaaaagcaagcttaagatgaaagcaataagaaacaaatcgctgtatgtccccatcagcaggtcatgcggcgattgtgtgccgcgcgcgccccgaagcatgccggaagcatctcttttcgtaaaataccctattaaaacaggtgcgcccatataaatgaacagccttaaaaactgaacggccgtcatgcgtttcaccagttccggaagcggtccgcccaacgcggcgcccatcagtccggctgctacgataagccctgtcccggccgccagcatcacgaaaagcgccgcaaatagaataaacggtatatgatgacccgccgtcatccattggaaattcacgaacaccagtataacagagcctgttatgccgagcatgcccggaccgactttatcatatgctaatgcactgataacagcggcgatggccacgcctcccaaaaggctcgcatataagaatatcagttgagtttgtgacatgtgatatgcggtctgaagctccccgtgaaatgcagaaagactgaccgctatggaaatactgcccgcagcgatcatgaaaacacccaaaatcggctttggaatcagcataagtttaatcgaaatcagcgcatgttcgtttctgtactgcataatcagcaggatcagcagaatgacgatgcttcctccaaatcccgccaatgtctgccatgatgaaaagccccatttcggcagatgaataaaagtataggcggtcagcacggctgatccacccgctaacagaaaaccgatgccgtcaaatggagatttttcagtatttttatgagcgtcatcccgcagccacatataactgaaaatgaggccgaaaaaagacagcaggccaaaaatgccgaacagccaatgccaatggccggcgcttgccgccgccgtgcctaaaacggtccccataatgacggacccgtaaaatccgccgattaacacaaataaggcgtaattccggcgttcaatcggaaacgaaagcaccagcatcggaatcataatcatcagcatagtgcccgccgcagctccctgtaaaaaacggcccgcggcgagcggataaatatcatttgtcacagcagcaagcagcgctccgatgacacccgcggccatcgaaatcatatagacaggccgggagccgaatctttttcttaaatacggccccgccggcacgaataaggcaaatgccatattaccgataataatcggatgaaaagagtcaaagttttccccgccgaccgtctgccggacaaggctttggacagccgaaagagcggtattcgacatcagccccggcccgacagccagcacagcaagcagagaaatgatccagtgatgtttttctttcatttgacagctcctttcttaactatttgacaaagtgaaaaagctaacagatttcccccattagcttgacagaattttttatatcttttcatgtgaaggattgaacataatatcccatttattatttcaaatccgatggaaattgtcaatataaagcgccgccgtccgatttcgtctttttcacaatttcccacaatcttttcattattatcccacactttttgtttaagatggagtcagtaataataggcaaatcatgctatgatgaaatagagaaacggagtgaacatgatggataactatcgtgatgaaaatcggacagaccaaaaagaacaggaagtccttttagtaaaagaaaacccgcagccggccggatattccgagccggacgaggacaagaaaaaacgaagcttcggctggttcagaccgcttctcggcggagtgatcggcggagggctcgccctcggcatctatacatttacgccgcttggagaccatcagactcaagatacttccaatccggctcccgctcaggaaacgtcatcggtaaccgccaagcagacatcttttgaatcagacagcggcaaatcggcaaacagctcatcggcaaattcaagcagcatttcgaatatggtggaagacatttcaccggcgatcgtcggaatcaccaatctgcagaagcagcaaagcagttccgatttattcggattcggatcaagctcggattcaaactctaatgcatcgggtgatgatgcggaaacgggatcgggttcaggcgttatttttaagaaagcaaacggcaaagcgtatatcattacgaataaccacgtggtcgaaggcgcctcttcccttaaagtgtcattatatgacggcaccgatgtaacagctaaactcgtcggccgtgattcgctgacggacttggccgtattagaaatcagtgataaacacgtaacaaaaacggcaagcttcggcagttcatccgctctcagaacgggtgaatccgtcatcgccatcggtgatccgctcggaaaagacctttcccgcaccgtcacacagggcatcgtgagcggcttaaacagaaccgtctcgatctctacgtcagccggtgagtcaagcatcaacgtcatccaaaccgatgccgccatcaatcccggaaacagcggcggaccgctcttgaatacagaaggcaaaatcatcggcatcaacagcatgaaaatcagtgaaaatgatgtagaaggcatcggctttgcgattccgagcaacgatgtaaaaccgattgccgaagagcttctcacgaaaggacaggtggagcgcccttatatcggcgtgagcatgatcgacttggaacaagtgccgcaaaactatcaggaaggcacactcggcctcttcggcaaacagctgaataaaggcgtttatattcgtgaagtggcgcagggatcacctgcagccaaagccggattaaaagcagaagacatcattatcagcttaaaagggaaagaaactgacacgggcagcgaacttcgcaatattctctacaaaaatacgaaagtcggcagcaccgttgacgtgaaaattatcagaaatggcaaggaaatgacgaaaaaaatgaaactgactcaaaaagaagaaacatcttcttaacaaaaatccaaggcagccgccttggattttttatatacagatgaaactttaggcctggatcagccgtatgactcagtgtacaaaggaggatacatacacatgaaacaaaccggacttttgctggtcgttaccggcctgatcttgctgcagctgagcattcagcttcctcagcaaaacgctgcttggggaatgacgcttggtgcaagcattttactgaaatttttcgtgaaccggactgatcatgcgctctctgcacacccagaccggccgcagatgaataaaaaaagccgcgggacattctgtcatcccgcggcttttattttacataaaagcaccctgtccgctggccggacagggtgtttgttaagacatatgctggtcccgataaatcttttcgtttttcataccgtacgctttttgcacgatatagagcggacgatcttttgcttcgtcataaattcttccgatatattcgccgatcattccgagcattaatagaacgatgccgctgaataacagctgtatcacaatcagagaggaccagcccgtaatggtgctgtctgtaaaaagcttcatgtataaaacgataaacatatagagaaaacccgctccggacatgagcattcccgcatagcttgccgccttgagcggtttatgagagaacgttgtgatcccgtccatggaaagcttcagcatttttttaagcgggtatttcgtttcccccgcaagccgctcatctcgttcatattctacagcagtctgcttaaagccgacccagctgacgagtcctctgacaaaaggatttttttcttttaatcttttcatctcatcacagacttttctgtccagcaggcggaaatccccggtgtcgagcggaatatcaatatcagtcacgctccgcagcagccggtaaaacagagaagccgtctgtttcttgaaaaaggtttctccctttcgtttcgttctgacggcgtacaccacatcgtagccttctttccactgctcaatcatatcaaggattaattcaggagggtcctgcaaatcggcgtcaatgacggcgattgcattcccctctgcataatccatacccgctgtgatcgcgatctgatgtccgaagtttctggaaaaatcaataattttcactctcggatcaatcagactttgctctcttaaaatctcaatactgcggtctttgctcccatcattgacaaagatcaattcataatgctcttttgtttgatccatgacttctttcaggcgctgataggttgtctgaatgacgagttcctcgttataaaccgggacgactattgaatattgaatatgtctgctcatgttttttcctcctattcatcagattgaagttcgtatagtgaagctgactgattcattccgcccggcccgccgctcattcggctgtttttacccgcggccttgctgctttttgtatcagctgcatcatgatttttcgttttctgatctgtgcttgattgccatttgtatgaagatactttctttccggttttctcaacccattcaacaatatcgttgtttccgcctttgcccattccggatgttaagaagtattttactttcccttcttttacgagctttttaaattgagtcagcgtaatggccgggtcagacccgctgaatccgccgatcgccatgaccgcttttttcgtttttataatgtaaggcgccgctgtgttggaatcggttgcagcaaatagataatccgctccggcgttatgtttctctaaatagttgatcagttttgtattgacagatgcgttatccattcccatgccttttccgcctgctgacgcaagctgagggcctgtttcaggcaatgagctgttgcctccgtacagaagcggtgtgctcgcccaataaatcggcatcaccatcaagacgagaagggctgcaagtgaaacatagtaactgagcggtttttggcgctgtttgaatacgaacagggcgattgccgccactgcaccgagaacgcctgctccgatgctccagcctgcgccgatttgatcattgtagtttttaaggataaacagctcaaatccggtagtcacaagaatagcggccggcaatagccaagttttccatcccgcctgcttgcggtacagatgaacgagggcgacccatcccgcaccggtaagagcagcaatcggaggcgccagcataatgagataataatggtggaaaaattccgccacactgaagaatccggcaatcggcacaagccacgctgcccaaaagatcgtttccttctgttctgctgataatcttcttctttctctcgccccggcgatcaataaaccggccaatccaaaaatcgcaaacggcaggagccagctgatctgatcagataattcttgttggaagagtctcagcggaccgggtgttcccgtaccgaacattcctgaccctgactgcattttcgagccggtgcctgtaccgctttttcctccgccaggaccgcctttgccgccgtctccgccgcttggagggcctccttgaccgccgcttggcatttgtccgttagatggaggtgccgtcatactgccggtttgtgatttgtctccgcttgctgactggccggccggtttttgcatttgtgaagaaccgccggaagaagacatccctttcgatgcgtttccgtcgggcccgccctggccgccgccggaactttgccccgtcagccgctgaatcccgttatatccgaaagccaattccaatacggagtttgtctggctgcttccgacatatggccttttgccggcaggaatattgtcaacaatgagcggccatgacaatgaaacggctgctaatacggccagcgcgcttaccagtgaaatgatttttttcttaatcgcggtatttgccgccatcatatagaacagcaagaaggccggtaagatcatataagcctgaagcatttttgtgttaaagcctactccgacgacaaaaaatgccgccaaaagccagatcagttttccttttcgaatcgctttaaagagaagccatgtggcgaacaagaggaaaaagaccagtaaagcatcgacattgtttgtgcgcgctacggctacagcaatcggtgtacacgccatgacaaacgaagcgatgcgcgccgccgtttttccgaacgtcggctttattaataagtacatgaatagaactgaacctacccccgccaatgcctgaggcaggatgacactccacccgtgcataccgaatatcagcgcgctgatcgtttgaatctggtatgtaacaggcggtttatctaccgtgataaatccggctgcgtcaaatgaagcgtaaaagaaattatgaaagctttgaagcatactcgttaccgctgcggtgtaataaggattcaccgtatcgtcattccagatgttgtacatattcaagaatgcggaagcgagtaaaataaggattaagactgcgtctatctcgcgttttttcattttcacctgtgttttcactccttttgtttaactttgaacaagtgtaacaaccaaatgtgaaaaatttattaataaacaaagacatttattttgccgtttacaaataggtaaaaagaatgacaaaacgggtaaaaaagcaaaaaaaaagatgcccccgtcaagccggaaggcatctttcattacttctgatttactgaatcggtttcagccgcgcttctatttcagaacggcggtgttcgagataaggcgggagcgcaaccgttttgcctagctcttcaggtttttcatcaaccataaatcccggaccgtccgttgacaattcaaacagaattccgttcggttcccggaagtacagcgctttgaaataataacgctctacaatgcctgagttgctgaaaccttctttcgtaatgatgcggtgccataaagcaagctcctcctcattctgaacacggaaggccacatggtgcacgctgccttttccaggacgctcgcgcggaagatcgtttctttcaatgagatggacttctgtacgcgcgccaccgtttccggattcgagcaccgtaaccgcgccccggtcttcatgtgtttctttcccgatttcagtgaagcccagcacatcggttaacacacgcagcgtcggttctgcatacgggacggtcaattcaacgggcccaagaccgcggaaagaatattcttccggtatgccgctttgcttcaccgcttcaccgatgtcttttcctttttcgtcagctgtcagcacaagccgctgtccttcatgatcctgaaaagcgagtgtgtccctgcccgctattttcacgatctcaccgtgagagacctgatgctcttcaaatcgttttttccaatattgaagcgcttgtgcatccggaacacgcaggccgattgaagaaatactgtttgtccccgcatggaacggcgcgatccgcggaatctcgaaaaacgtcaattccgatcccggattggctgattcatcaccgtaaaataagtgatacatcgtcggttcatcctggtttaccgattttttcacaagcttcagccccaggatatttcgataaaaatctaaatttttctgcgcatcagccgtcaatgctgatacatggtgtattccattaactttcattatgttatcctccagtcaattatctcgatttcgagatattttatatatacaatttatgttatccggatcgtaaagtcaacccatctgcttcacagacggtctgcagactgccgctctcaaaataacgaacttttgatattaaaaaaccattaatgttcgcttttaaaacagtattttttccttctcaaaagcataaacctttatcttttaggcaaaacaccaaaatcagaaaatttattttattcgtgtttcagcaattagggtttacaatatggaaaatagttttttcagcataacgattttacatctggagggaaaggatatgcagattgaagagaatggacttaaaaaagagatcggccttaccatcgccctctcacttgttatcggcaccatcatcggttccggcgtatttatgaaaccaggcgccgtgcttgcctactccggtgatgcgaaaaccgcgcttatcgcgtggctgttaggaggcattttgacgcttgccggcggcttgaccgttgcggaaatcggcactcagattccgaaaacgggcggactttatacatatctggaagaagtgtacggcgaattttggggctttttgtgcggatgggttcaaattatcatttacggccccgccattatcggagcaatcggcttgtatttcggctctttgatggcgcacttgttcaattgggattccggctggtctaaattaatcgggatttcagccgttttatttttaagcatcattaacattatcggaacgaaatatggcggcatcgtacagggaattacgactgtcggcaaattgattccgattatctgcatgatcgtgttcggcctttggaaaggcgatcagcatattttcacagccgtcacaagcagcatgtcggaaatgaatttcggcgccgccatactggccaccttgtttgcttatgacggatggattctgcttgcggcactcggcggcgaaatgaaaaatccggaaaagctgctcccaagagcgatgacgggcggactcttggtcgtcaccgccatttatcttttcattaactttgcgctgctgcacattcttcctgcgaccgacatcgtcaaactcggtgaaaatgcgaccggcaccgctgccggaatgctgtttggcgacatcgggggaaaattgatcagcgtcggaatcatcgtcagcatcttcggctgtttaaacggaaagattctcgcttttccgcgtgtctcgtttgcgatggcggaacggaaacagctgccgtttgccggacagatttcgcgggtgcatccgacattccgcaccccgtggattgccgtgtcatttcagatcgcgctggccattattttcatgatcgccagcaatcccgataagctgtctgagatctctattttcatgatttatattttttacgtcatggcttttttcgccgtgtttatcctcagaaaaaaaagcggcggaaaaccgcgcgcctacagcgtgcctttgtatccgatcattcctgttttggccatcgcgggttcactgtttgtgctgatcagcacgatcattacagatacactgagctgcgcgctgtccctcttgatcggcctcgccgggctgccgctttatttttggctgaaaaacggcagaaaaaactgacaaaaacggttccttttacgggagccgttttttttctggcaaaatcacgtgcaaaagttgacagcaaattcacatcttttgttatactttttaagcaagatgtctgaattcgaagtatgttacgtttttttggcgaagtgggtaacataagaaaaacaggatgagacacgtttttacgaaaaaatcaagaggcgtttttttcgactttatctgttttttttcgacaaaaggctatataataatttgatgtgtgcattgtctcattcaaacaatggagggtttttaatgataaaaagaaaaaaagataagttctcactccttttaacagaaatcgcaaaaaacatagacgaaaccgcagaatactttgtcaactttaaagtgacgaaccagacgactttaaaggaatttgccgatacgttaaaagagtttgaaacaaaaggagataatcatgttcatgtcatgattaaagagctgaacaaagcttttatcactcccattgaacgtgaagacatccttgagctgacaaacagcctcgatgacgtgcttgacggaatcgaacatttttcagcaatgatggagattttctcgatcacttcttcagatgagcatatcgataagttcagcggatacatcagagagtgcgcgaaggaaattttaatcacgattgagctgcttgcagaaaaccgattgaaggacattcaccctcacgccattaaaattaaggaatacgagcacagctgtgataacctgcaccgtaaatcattaaaaaatctgttcggcacagaaaccgatccgattaaagtgattcagtaccgcgagatttacgaaacgcttgaggaaattgccgactcttgccaaagcgttgccaataaccttgaaaccattattatgaaaaacgcgtaacgaggggttataatggatactctattacttttaacgatattaattgtcatatgcgctttggtatttgacttcattaacggatttcacgataccgcaaacgcaatcgccacctcagtttcgacaaaagcgctgaagccgcggcacgcaatcgtcatggccgccatcatgaactttctcggagcgatgacatttaccggtgtggcgaaaaccattacgaaggacattgtgaatccttatacattagacaacgggtcagttgtcattctggcggctctactcgccgcaatcgcctggaacttgatcacatggtatttcggcattccgagcagctcttcacatgcgattatcggagcgatcgccggagcggccattgcagcgtcaggttttgcgacgcttaattataaagggttcattaagattatcgaagcacttattttatcgccgattatcgcctttgttctcggctttatcgtatattcgatcgtgaagctgatttttaaagacagcaatctggcgaaaacaaataaacgcttccgcagagtgcagattttgacggctgccattcaatcctatacacacggaacaaacgacgcgcaaaaagcgatgggtatcattacgatggcgcttatgacggccaatttacataaaagtgatgccattcctttttgggtgcagctctcttgcgccctggcaatgggtctcggcacatccatcggcggctggaaaatcattaaaaccgtcggcggaaaaattatgaaaatccgtccggtaaacggcgtatctgccgacttaaccggcgcagccattattttcggggccacgtttattcatctccctgtcagcacgacgcacgtcatttcgtcttccattctcggtgtgggcgcttcccaccgcgtaaaaggcgtaaactggggaacggctaaacggatgcttattacatgggtcatcaccctgccgattgcaggtacactcggcgccatcgcctttttcatcttagatctctttttctgatgacatccgcttctttacagaagcggttttttttgtgacaggaaaatgatgtcatgacatagaatgaacatagcagaccatttttcgaattgtgagggatgctcatgcttttgttttttcagatcatggtgtggacgatggcggccgcactcattttatatgtgtacgcatcctggcggtatgaagcaaaggtaaaagaaaaaatgtttgccatccgtaaaacgtggtatttactatttgtagtaggcgccatggtctattggacatatgatcccgaatcgctctttgccgcatggagacaatatttgattgttgccgtctgctttgcccttattgatgcgtttatctttttgagcgcgtatatcaaaaagctcgccggcaatgaattagagacggatacgcgggaaattttagaagaaaataacgaaatgcttcactcctatcttgaaaaactgaaaacctatcaatatctgttgaaaaatgaaccgatccatgtatattatggaagtacagaagcttatgcggaaggcatcagcagactgctggccgcttatggagaaaaaatgaatgtcacggcttccttgtgcgactattccgcacaatcggataaggaccgcttgacggagcatatgcctgatgcggcggacgttcagtcccgtcttaaccgtaaagacgtctactatgatcaaaaaggcaggcttgtgcttattccgtttacagtccaggaccgccattacgtgatcaaactcacgtcggaaaacctgttgacggaattcgattatttgcttttcacatcgctaacgagcatttatgatttaatgctgccaatagaagaggaaggtgacggttaaatggagcaggcatttcaaaacgggcagccggaacaaagagcgaaaccgttcaaaatgtttaaaaaacgttcaatgacaagtatcgcaagttaccaggtcagccctcataccgccagaattttcaaagaaaacgagcggctgattgacaagtataaacaaaaaaaagcttgattacactaaggacaggagacacggctcttgtccttattccttttttccatatctttcatataataaaaccaacaaagagatgcgacaggtgatgatgtgaagaaaattgtcagacgcgtaaagtttgtggattacggacgcttcgggctttccgcttattcgctgaggatgcgggcgaggaatctcgggttattgaaccggttaaaaaagaaaaaaggctgaatcccgcaatgtgaacgggactcagctttttttgttaaagctgcatcagaattttcgcttttacagcgggaccgtagacgccgtcagacgtcagtccgtttacagattggaagcgggccacggcatctgccgttttcggaccgtagataccgtcaatgccgttattgacagctcctttttcaggatagaaataaagcgcggcgagcgcgttctgcacctggtataccttttcaccggacgtgtacggctctgtcagcttgatcacctcgtccggaagagaatacagtgcttcaaccggcgggctgacgatcagcacttgtccgactttaatcaagttcgggtcagcgatgttattccatttctgcagatcggccacgctgacgccgaatttccgcgcgatcgccgacagtgtatctcctttttggacggtatacgtctgtctttcctcagaaccgattcccgctttaaactcatcccatgtatccagcagtcttctcggacaaagctttcctgaccaatgcttgtgcgcaacgacattcgcaagcgggatgccgtgcgacgtcattaatgtgcggatgagccattgggcgtttgccacggcctgtgaaaagttgccgtctgcgttttcacaaatttcaataccgatggatttacggttgccgtccccgtttccgtcaccggcatgccagccgttttcgttcagcggaagatgctgataaatttccgtatcatcgactgtgaaatgccagcttgtcggtgtatcgggatttttcacatagcttgcgtgacttttggcgttagctccgactgcggtattggctgtattgtgcaccgtaatgtaaatcggtgtcattgcatagcctgggcggttattgtttcctgccgggataaaatcctgtgtgatttttaccatattctcatctctcctatttcgataaattgtttatttttaataaagcctgctgttttttcccttttgctgtaacataattgtttttaaaccaggcggcggcagtcgttatgattgtaaaaacggccgacccggcggcatacagcgtatctgcaagctggctgacctggtcctcctgaatattcagcggcgatttgccgaacatcagcaaagtttgattcaataaagcaagcaaaagaagcaccgtcctgacgaccgtgcctttgtccgcgaatttcatatcggtttcccccttacttttgcagcagattgtacatgatggcgattgctccgccaatgacgcccgtgcagattgctgtcacgatcgctcctgtaatggtccgcttaatccatgttgtgttttcgtcaattttgttcagtttttcattcagcgtcatgatttgctgatcctgccggtctgatacccgctctaatgcggctacccgctgttcaagcaccttttgttcacctttgatgtctgcgaattctttttgcaccgcttgttcatccagaagcacttccgctccctcctcttacattgttctcacctcccttcggaagcttcattcttaagaaaatgccgtgcctttgacagaaaggctcccgccggaaatgctcttgatttccatgacgatttccttaaagccggcaatatcaaatgaccacacttcttctgtgcctgacgtaccggcggctgatgtcccgtcatcagacctgattcctctgatcggcacattttttcccgagatggatctcccccaaaacgcgacatggcccgactcagccgtaccggtgatttcgacgagaagttttttccaagcgcctgctgagaagatgcttccctcgcccgcctctgctgcattttcatgaaaaatcacgtctgtatatgaaaacgccatatcaccgcccgtaccgacagattggtataaaacaaattcggactgcttttgatttccattttcaaaacggaaccggtaatatctttttgtcaggctgacccaccccgaagcggtcagcactccgccttttactgcgacaaaatgtgaagctgtccacgaattgttatcctcgctctcttcgataaaaagagttccgctgcggtccgaataagcccacccctgtgctctgtctattaagacggctcctaaacggtcttgtccgaattggctgtagacttcaatcgcttctagcggcgtattggtaagaagctctgccattccggacaaatcagcaaccggtgtgacataatcgtttttgttaccgcgataagcttttacggcgccgggcctgccaagttgatcggcgggaaattcaaatgaatgctttttcatcggccgtcctcctgttctcatttattaaaaatgacaaataaaaaaagccgtttggcttatgacacagcatttttatagttttcgtatgtttcacccgttatttcttgaaattcctcaggcgtgatatacttcgcggccaccccttcagccagatcttcggcagagcagtcatcatagcccatagcctgttttaccatttctgttgaggcccactcataaaacaaggcgtaaacccaaaagttaagttttttcatttttttcattctccttttacgtttaagagttccagttttaaagacgctaattgcctgccgagtgactgctgcgcttgttcggctgcttttctggccaatttctcattcgccagctgtccgccgaggcctgcaagctggtttgaatcgggagccgtatctttttttaagctctctttatatgcttcgtcagcggtttccacccattcttgtttctcttcatcaaaaaatgggcgccacatgccttcgccgtttatttccggcggaaagcccgcagcgttaggcggcatcacataatctcctgtctcagaatccggataaagctcaaccggagtgcctgtataaatgttgtcattgtcatacggaaatattaatttcatattctcgctcctttacgtgagtgccaaaacaaggtcaatataatagccgttcacgttattttctatattggccataattcccgtcagcttcatatctccattagaatagataataaatttgctgtaaccggtggtgccgctggctgcaaccatcgttacaacgcctttggccggcgcacaagaggatggcacactcccgaataccacttctctgtccgtaagaacgtgtccgttcaggtgaagggtgtttcccactttacggtattgaagcggcctgtctcctgatttagcgccatttttataaggaacatttatccaaggtacattctcagtatcaagttcagtaacgaggcgacgccagccctgccagcccaagttcaaatccaaatagttcgtgaacatattatttttataatcgacggcaatgacatacccaaacgttcctttcccctcactgtcaagagaggtaaaatgaaacatgccgcgggttgaagcgttgctcggactgtttgccgctttgccggttgaataaaaggtgccgaacgccctgccgtttttaacgattttttcaagaaagttatcatcatcaccaattgtcagaagatagccgccgttatcgtttgttattttcgaaagctgtgcgccgttccacatatctttatccgcctgtgtgacatgaatgtcttttttattggcgtgagcctctacttttgcttgagagcctgaatctgtttcttgttggctccattccgaccatacgcctttagtgctgaaacttcggacgtatatgggatttccggcggtcactgtgtctataaacatttggacaaaagtcggtgatgctccgcgggttctttgcatgacaattaattgtccgtattccgcaggcttattttctgtatgctgaactgatatatagtagatgccggacgtttttatattgtctaagtttgtttctgttaccgttttagcattcccgtcattgtcagtcagattgaataactgccctgcattccatttgtctttgtcagacttggttacatgaagatctgttttgtcggcatgctcatttacttttgcttgtgctccggcagctgtttcaaatggcatccattccgtccagatgccgtttttcagcgtttttctccaaaatcccccgtcatctgagaaagcggccgcctctccgttattctttgaagaataaaggtatataccctctgacggtttaggcggggtatttattccggttgcagctgctgagaaagtaaaggtcttattctggctggcagcggtctgatgaaaatcctgtccgtcagagatattaataaaagcggagccatcatcttttgtgattttagacaattgcccgttattccacttctggcgctcttctttcgtcacatgccggtccagatcttgattgtgccggtcaaaatctttctttgctgcctgctggacattgtccacgtttccgaggccgatttgcgcctttgtcgttttgtgcgggttgttcatgtcgtttttatgggccgccagatccgtgtgggcgttttttatgcctttttcccagcggttgacgtcatcttcattaatcggatcgtccggaagccagtctgttttttcttcgtaagccatcgttacaccacctcaaaggtaaatcttaaatcaagcgttctgttattgctgagatctaaatttgtttttcgttctgtaatgacgcttcctgtttcgtcaagcatctgcacggtttcaatgtgtttgacgtcttcttccctgcgtgtgagaacggtgactgcggcatcttttacggaaatgtccgcaatcggagtttctttgccgtttaacagcacttttgtgatcctgtttttcagatcggctgcggcacgctgtctgtaagcggctgatatcatggtaagaccacctcgttattgttgagtgtgacggaataaccgaccttcagttcactgacttttcggtatctccgattgttgagaatgacccggtctttgatttccagtgtttcgtttaatgcggctctcagtgtatacgccaaatgagcgggtttgattttttcaagcgtttcaatcagctcgttcatgtgctgcaggtcatcaagcccgatatcggcataaaaacgatactgccccggaaacatccgaacataagctgacggatgttttaaaaaacggtttagcgcctgctcgatcgcttgatgtgtgatgggcggaatattcgacatcttcgagatcagcctgagccgtctcatatcctccgtgtcacctgattcccgcggtatttttaatattttttcccagcggtcaagcccccatgtcgccgtcgtgataaagagctgatccgtcaaatcgaaaatatcgttattctgccgctcaaactcaggagcttccgccataagcagttgtgccatctcttttaatcgggttaaaaacggcgggaggtacgccgtcatctcatcgagtctgctcaaggattttcacctctttgagtttaggaatttccacgtcactgagcacgaggttttctgccgcaccgttcattttaatatcggcgtagtcactgacggatgccgagttataaacgatgttgttaatttgtgataaacggacggtgttttcttcaaaggccattttcttgaataaattcagtacgcctttttcaatctccgcttttacgtcatcgatcgagctgttcagctcaggcagcacggaagcggagatttcgatttccttccatactgcgctttccaccgttactgccgctccgatcggcgcctgtccttctccctgcccttcgtccggatcaatataatcctttacttttttgatcagaatatctgatgccggttccaaattcgcatttgtgatgacaactttcaccgttccgtctccgttccaaagcgggaagatttttgccctgccgacgccgtcaatctcttcggcccattgtttataatgctgtttatttgcgctgactgcctcccggcggacacgggtaaaatagcgcgcccttaagctgttgtcatcttcttcctcacggccgggaattaatatatcgcgcatgactgctttctcaagcccgggtatcgtatcaagcggcagcaggttctgccccgaaatgccggcattgcccgcttcaccggctgtttcacattcaagcgttccatcccccgtatattgaaaatacaggttatcaacgaagaaacgggagcctggcggaatggtgatgcccgctgtgaattctccggctctgaccgctttagtggcaggtgttcgttcaattcccgcctcagcagcacgcctgtccagaaattcaccctgagccgtatcggaaaacacgagctccagcacggtatccagccaaatataagactttgcgagctcagcggccgcaggcgcgagcgcattgtaaatgacgctgccttctctcgtatcaatatccgccgtaacgcgcgccagcattctgtccataatgtcgtcaaacgtctgagcttcaaacatcctcacccagcacctcctctatctcaagcatgccctcatcagtttcaacggtaaaagagacgatgaaggcatcatcttttttctcaatctcaaaattggtaacggccaaaatacggtcatcatacagcaaggcttcttctatcagtcttggaatctccatttttttataagcatccgtcgtgttctgatctgaaagcacttcctgaagttcgtttccgatatcatggctgaaaaccgaatatgaataccgttctgtgtgaagagcgatatagacgaattgtctgattgcgtccagtccgtttatcagttcattggtaatccggttgttttcaaagtcaattcggtaggtttgtgaagtctcaacagcctcactcgcatcctccaaatcttcaaattcgatttccggtgtcagggccattgcacccgctccttttagatttgttcatgtaaaaaagccctcttcggcagatgaagcggctttaataggctgatattcccgtatatctccgtccggatgccggttaaattttgtccagtacaaagaaagactgtcctcctgttaaagcggcggtcatcacccgatctcccgcctggagctgatcatcttctccggatctcagccgcttcggcacaatgagtgcatcagacggaatcaaaagtttgtcgtgatctttcagtttcagctcgagcggcgaaacggaggtcacttcggccggcatcagctccaccggcgcttcagcgtcaaccgctccgacggctaaatgtttaatggcatcacttaatctcatcaggctgtcccctccggaagtgaatttttctccgtgacgtcaatcgtcatggtatgttttgttccttggaattcatggcggtccgtatctacataataggttttcttcagcccgatttccggaattgaaatatagacgggcaatccgctttccaacccaggaataccgatcgcctgtatatttttcagctctttcttaatgccttttttctcagcctgcttcacttttgcgcgctgtttcagctgggcttcgttaatgtcgtcagaaaccgtttcggtatactgcaaaacgccgaatgttttcatgccggcgctgtctgaggcggaagcctttatcgttttattgtctttttgcagccgcatgacgacacgggttgcggtgtcatcaattgaggtgctgtattgataccctgtaatattaactcctgtttccagcacccatatgtcagacggctccggccattcacgcaagccgagcctgcctttttctgaatagagctgataattgcgccccgtctggctttttgtctgctttaacgcttttagcatcatatcgtaaaggcttgtatcatttttaaaaacgagtgatttaatagtatggcctgtgttggcaatggatgtgacgggaatttgaaaatcgctggcgatcctttttaatatttgatcagcgcgcttgttggaaaacacgtaaacgtcctggtttttcacaaggtattggagcatatcgtatgcggtgaaggcgacggtatgctcatcgggcgttcttgcaaaaacaatgccgcggaacagctcttttccgttccatttgaacaaaaccgtatccccttctgatacgccgtaatacgtctggctgccctgctttacgacaatcgtcgcttcgatggagcggggcgcctgatatctgtgtccttccagcgttacgctttctgtgacaagctcgagccactccgtttcttttatgacaaatagttcaatcatcttttcacccgtttcattgcggtatcttcagcttctgccccgggaagatccaatgccccggctgccggatattccgtttgctgcgcttaatcatggcggttttattcgcgttccagattttccgccactccgtgtgttttccgtaaaacttgccggcgatgtcccaaagcgtatccccttttttgacggtatatgttttgggtgaagctttggacgggcgcttcgctttcgtttttttcttttgtttgatttttcttggcgaagcggttttatattctttcagtacgatatcaaaattccggtcgccgatttcattgtcaccttcgctgtaattaaagctttcaatgctgcatgtgacattgatttttgtccctgtaatcaaaaactgaacgggttttttcgctttcatccatgcttcaatggctgaaatggctttttccggtgaaggaatgctttgatattcggcaatcgggctgtaccgtttcggaaaaaaagaagagaacgaaatttctttcgctcccggttcttcgataaacgtcacctctccaagtccggtgactttcacggaatcattctgcacgctgtttgcgatatcaatcgcttcagggagaacgggaagccggagcttgtccttcccttgagacagccaaaattcgtaaacagatttagtcaaaagcaacggccccctttgctccggtataaatgtctttttgcagttcatcaatcagcgcctgtttgattttggcggctaggctctcggcgtcctgcccgttatggaaatgctgatcgccgctgaattcgattttaatttcttttgttcccgttttttgaacggtttggccgccgcctttaacggctgcggaaaccgtgccggctgaaagcgccgccggttccgtccgggacggatcggacacttccatgccgagcgcctgagccgctttttgcagcagataacggccgcggatgccccgctcttcagggatgatccactcccgtttgttcccttcgccgacacgggcgatctgctccttggtaatcagacccccattggcataaccgacgtaagggccgccatgagccatacttttaatcccggggacattgctgatcgagccgtatcggcttttaatatagccgatagcggcagcggcgttgtggattggatttctgatatcattcatgcccggcgctttgtgatcttcaaaggtgctcggaatcgtctgcataagcccctgtgacgggtgtccggctttggcgttgctgtcccatagattaatggaattagggttgccgcctgactcatgctgtgcgatcgtcattaatcccggaagccagctgatcggcgtattggttgctttcattgcggccaaaagccattctttgacgcttcctcccgctgcacccatgccggaaaaggctgctgcaagcgagcctgcctgtttttccgcatattttttcacgtcaactgagctgagacctttgacgacgccgactgaagcaaagcgtccgagactcatcatgacacgggaaggagagtgaatatcaagctcttccctgaatgcgtcctcgacttttttggccatatctttggccgcctgtttgacttcgcttccttttgcagtcatccctgatacgaagtgtccgatcaggcctgacccccagccgttcgcggaatctcttgattgaacaaacggtttattgatatgtgtgcttacgtattgcgacgttcccgtatcttttgcattctgtccggccgaataacctttcactgtggcggcgccccatgatgacgattgattaacctccgattgataaggtgttttcacctttgtttttaaaaacgaatcggtgcccgtcggcgatgtattctgacctttggcatagcccgcagcgacttgctttccgtaatcgggcgaagacgaaataagggcgttaaacggcgttccgatgtttttctctttccagccgtccatatccaccgctttattgctgattccgctgtcaaagccttcagtaaactgtttgccgagtgatgaagccgtccccgcaaatccggaagcatccacagacgcagcggccgatacagacgccgaagaagaaacaccgcccgctcccgccggcacagcggaagactgagccgaagccgcgcccatatcatcgacaacacgcatgccgagcttagacgcagcttgtgaaagcagcatcttcccgcggccgcgattgttgtcgacggggatgacaaattctttaccggcttcaccgatccaggaaatggtcggctttgtaatgtagccgcccgtggcgtttttgtccgtttttttctttttatctccgccgcctcctgtgacaaagtccattacgcctgaaatcaatttgccgccggttttatcccaaatctttttcacccagtcgaatgctgcagaaaaagcatctgatatggctgttcccacttttacaagaggttcttttatatgtttctcaaaccagccgcttaaccctttccatatatcctttaccgtatctaaagcagtcgtgaaagcgtctgatattccttttccgactttttccaccatgtttttcaccgggttccagacaatatccatgaaccagccggataccgtactgaaaacagatttaattttatcccaagctcctgtgattttactccaaatggacgtcgctactccgacgacagccgattttacgggctcccagacagtgctcataaaccagccggatactgtgctgaagacaccttgaatcgtcgtccacgcattcacgatatttgaccatatgcttgtcgccactccggcgacagctgatgaaaccggcgtccatacattctccatgaaccaggatgacaccgtgctgaaaatcccttgaatcgtcgtccatgcattcacgatatttgaccagatgcttgtcgccactccggcgacagctgatgaaaccggcgtccatacattttccatgaaccaggatgaaacgcttccccaagtatcttgtactgttgtccaagcactttgcgccgcttcggaaatatcattccatgtgtctttcaaagcccctgaatcaaaggcctctcccaagctggaaccgcctaaactgccggcgatgccgcctaccgcgccgccgattaatgtgcccactccgggaacaacgctgccgattgccgctccggccgcggctcctgcaagaccgccgcctgctgagccgaccttctctcctgcattatctttattgatgccggctaaatcagtaagtgataacaattcacctatgccgggaattcctttagcggcaccttttaaccctttcataccgcctttcagcgcctttgaatctcctaagcctttcaaaagcccgccgatgcctttacctgccccttttgttttcggcgtgtttacggatgcctgtttgctttcctttacggaggaacctcttttcgaagatttattccgcccttcgactttactgcttttgcccctcgtcactccggtacagcagcagccgccccccaaagccccgccggtttttttggctgaccttcctgaagatttcggtgatggtcccgtgcgctgcggaccctttgtcagctcaggacgcttcgggctgttggtgccgccggcagaaaggctccccttactcttttcttttttcgtgccgcctcctaataatccgccgatattgagtttgcctaatttttcagcgattcctgaaaatattttttctattaattccccggctttttcgatgattttgtccgggctgaatttctcaaatttcttggcaatcttgctgacaattttatcaacaaatgcctcggctttttcgatgatcgcatcagggctgaacttgccgaactttttatcaatgcctccgaacagtgaggaagtaaactgctccactttttccagaatcttatccggattgagaaaatcgaatttctcagaaattcggtcaatcgtgtcatttacaaattgttcggcgcggtcgattagcttatcaggactgaatttaccgacaacgtcgtcgactttcttcataaacgaatcagtaaaatgatccagctctttcaatatggtctccggactgaatttgctgacaacgtcatcaacctttttcataaatgaatcagtgaatttatccagttctttcaatatggcttccggactgaatttactcacgaccccgtctacctttttcataaacgaatcagcgaatttgtccagctcggctaatatcgttgccgggctgaatttgctcgcgatttcgtccgcttttcccatgaataaggtcgtgaacttatccagctctgctaatatcgtctccgggctgaatttgcttgcaatctcgtccgctttccccatgaatgaggtcgtgaacttatccagctctgctaatatcgtctccgggctgaatttgcttgcaatctcgtccgcttttcccatgaatgacgtcgtgaacttgtccagttcggctaatatcgttgccgggctgaatttgctcgcaatctcgtccgctttccccatgaatgacgtcgtgaacttgtccagttcggctaatatcgttgccgggctgaatttgctcgcaatctcgtccgcttttcccatgaatgaggtcgtgaacttatccagctctgctaatatcgtctccgggctgaatttgcttgcaatctcgtccacttttcccatgaatgacgtcgtgaacttgtccagttcggctaatatcgttgccgggctgaatttgcttgcgatttcatccgctttccccatgaatgaggttgtgaacttgtccagctcggctaatatcgttgccgggctgaatttgcttgcgatttcatccgctttccccatgaatgaggtcgtgaacttgtccagctcggctaatatcgttgccgggctgaatttgcttgcgatttcatccactttccccatgaatgaggtcgtgaacttatccagctctgctaatattgtctccgggctgaatttgctcgcgatttcgtccgctttcttcataaagcttgcagcgaatttatccagttccgctatgattgtttccggataaaatttggatgcgatatcattgacttttttcatgaaggtgtctgcaatggagtcaagcattgaaaaatcatttttcggcgaagcaggagcagcagatgcagaagcttttccgacgtccggcatattcttttgcattgcagccagctgtgctgtcaccttttcgtttaacgataattgaatgacattgtttttccccgtcagcgaatcaatccccgctgaaattcggccgactgttttcatgacgtgatctatgacgcgtatagtgacagagtacccgttctttaacgcagattgcatgtagcgtttgatacgttccatggcaggagtcacttcgtctgacgcatacagtgaaacggtaaatcctttaaaaccggcagccagatcccgcaatctctcaaatgccgctgtcgcgctgtcttttgctcctattttaacggttaaagacgcaggcagacccgctaattgggcttgcaccttttgaatgacggcactggctccgtcttcagctgaaatagagatcatttgtgcgcccagctttcttttcatagagcgctggatgcggtcaattgttcttaaaacagatttactctctttgcgtatatcaatttcactttggcgttttgtcattttcctgtatttctcaagcgctctgaagccattttggattttccttattttctttgaaacccgatcttccaattcaaaacgggcggtcagctttgccatgatgtcgctccccctttcttcgcttgtttttcaagaatgtccagcttgtaaccgattaaaccgtacaacagcgccttaaaatgtctcggtgcttcatataactctttcagttctgatggagaataatgaagctcatgcatcgcgtaatagagatacacggcttccttattcccatcttttatcagttttttgcttcttgctccagatcttctaattcatcttcaaaaccattgatctcaatcgctttattcagccaatttgcatactcaccgccgactgaaagaacgcgttttgccacctcgaccggatctgccgttttgtaagcgtcgcggagctccttagaccggaaatcagggtaaatcgtagattcaaccgcgatccgcgcatagaagcgctggctgtctaagtcttttacgcggcctctgcccttcacatttttatatgtcgtgctttccttctccagttcgtcaatgcgctcagtcgtaatggctttaaaaataaaaggcacgatgtttccttttttatcgacaaaacgctttgaaagcggaacccggatctcctcagcctcgactgttttacccggcataaagaatgacagatcatatacttgttcgtttttttcgctcatgatgaaaactcccttactctttttttataaaaaaacaggcctataaaaggcctgtttcactcacaatgattctggttaaaacgtttcagaaagcttttccggcacatcgaaatcttcaaaggtaaacggcacttcttcttcgagggcttctgagtctacgtccagtccggcgatttttgcagaatcaaagttgacgtcatacagggtgacgcgttctgttccgcggcctgatgatttgtcgtcaagaacggcttgcagcgtaaaatacgggtcgctgccttttttgacgtaatccatcataaggacggcgaatttggatgtgaccttatagaatgttgccgtgcccgttccgttggcgcctgttgttttatgtcccgtcatgcggcggcccatgatgtttacttctgatttgtttttttccacgtttgcttcaaaggttttaatatgcgccatctcttctccgtcgagaaataaacggccttcttttcctgaaatcgtgttttgcgcttttaatgccatcttagtttacctccacattaaagtagaatttttctgccgcatccacaggctgtacggcgagatcgattaaaaagccgtcgcggtcttcattcagcccgattgtaatgtctttgtctgaatcaaagttagcgatgccgcccgcatcctggagcgttgtcaaatattgaataatcatcgttttgacgaattgaaggccgtcatttgtcgcaggaagatcgcttccggtgccttttttcgatttaattaaggctttcagttcacgtgtcaaatcgttattcaccgcatcaagcacacggacgattttgtttttcgcgaactttttgtttttctctgccgtaaatgtcaccaatgagttgatatctttttcaacgctgactgacttatcacgggcatcataagagaaaaggaattcacctttggaaagacgttcgatcacttcatcatgagtcaagcggtgcagcacatcgacggcgccttcgtattcaacgaatgttaaggattgattaaatgcggcgctggcacttgcgcctgccacccaggcggtcgcatcttcagctttaatctcagttccgtcttccagcagcacaccttcagtcacattgataatgccttcataatccccgctgtaatgggcggtcaccccttgcactttctgtccctgcgcatcgcgaaggcgtttaatgaatgcggcaaatgtcgctttcagctgatcgttttccgcgacaggaagagcgatgacatcgaaattctccgtttcagccgcagctaaaaaatccgtatagtctgagttgaccggtgctttatcagttcctcccgcgagacggatgcctgcctgcgggtttaacgtttccccggattcttcctcagtgcctgtcagcgggatggaagccgacagttcgcccgttcccgtaaatgtgacatagccgtttgcttttaattcttcggcttttttcaccgtttgtttgtcaacttccgcttcatccatgtaagtggtcacatcgaaagcggtctgatcaaggacgttttcactgatgcggatgatgatgtcatttccttttgaacccccgtacaaagcggttgctttaacaccttgcgaaagatctgcgctcgctctgattccctctgtcagacggtacatcaaaacggtttttgctttctttttcgcctcacgaagcagaatcagtgacggatcttcaatactgagccccacttttttattcaaatcctcaacgcttgaaatggaaacgaatgttttcgcttccccccagccggatgcgacgggaagggcgacaatcccgcgttcaccgatcgatacccgctcctgggcggttgttttaaagttaaaatagattccggcacgttctttttcttttccttgcgtaaatgttccgccgttcattattgcatgacctccttggttaaaaatgcttcaatgtaagacttggcttgcgcttttgtcatttgtttttgcttcacgccgaataaagcaccctggagaatctcgggttttacgccgaaaagctccttcgcgtgctttgttaaatccgccgtgtcataaagaaccgctcgttccgccgttgcggcgtttttctttttatattgtttcacttttgtttcaccccgctgttaatgtccacatcccgcagtgcgggagatgtttgtttttgatagtagtagcggctcgtccagcggatggtgatcactgcctcgcctttgtctccgactcttgtttcgatacggctgatgcggacgaaatcaccggtatcctcccctgattccgtaagcagcggaatcagctgtcttgattctctcaccgcatcggcgatcccgtcggctgcatagagggcctgcaccgagtcggcatggaacagcttcacattcagactgtatgtcttcttaaaggtggagactgtgtcattctcgtcaaaagcatacgggggcgggatgtaaagtgacggcacctgaaattgttcaggcagttcattttcatatacgggcacgccgcactgctgatacaaaaaagcggcgattgaaccggtctcgcgattcatccgatatctccccccaacgtgttaagccactgattgaaacgcttgtccagcgattcggcgaagagtgtttcatacaaaagaagggctttgtcccaaaacccatttccgctgatccactgttttttgagcgccattcccgttgaagctgacggatcatagatgaaccgggagccttgaaaatacccgggcacccatctgacattttcatctgagacggtccaatgtccgtcatttatgaatgaggcatactctacattggtgccgatttcaagggtcagtcccccgttttcaatgatccatacgtgatcctgcgctcctttccggaaagaagacagcaggctttctgtatcaatcccgcccgaatgaataagctcctcccgtaccaagtcgagaaaatcctctcctgactgttccagccattcgcctgcctgacgggcaaattctccggatgatgccttttgcagcgaccgattccattgttcaaggttttttatgctcatagtctgtcatctctcacagcgataacctcccaatggtgctgtcttgttttcttcggcatttccagaatatacgcctgtccttcccaaatgattttgtcattgacacgcacaacggcctctttcggaaaatgaacgagaaaccgctgatataccttatgatcaggctcaagctgaataagctgctgctgtttttcaacaaacagacacggcacgtcttcataatcgggcacttccggataagaaaagacaggctggagcttttcggcgggaatcccgaagcgtccggccttcggaactgacaccgtctcatgataaatatcgcatctgtcagtgagcagccgttcgtagctcataaaggtctcacctttgcgtgtgcagaaaccggagaataacccggcgcgatatattcacagagcagatggtgcaccgccggttttctgattccgccttcacctgccaccgtatacgagtagtcgcctatcttttcagattgataggcggaagcggctgcttcattctggttgatcagcgcaaaatattgagaaagctttaataacgcaagcttaatcttttcgggaagcggtgagtaaacagggtcagtgaacgaatgccccgccattctggccgcctccgcctccgcctccagaatgtcctgtataagaagcggctccggcctgtttttgacttgatcataaactgaatatgaaacaacgtcagacggctgaattaacataactgccacccccgtcttattctttaacgtttacgattttggcgcttgcatcttcttcttcaaatttgctgtcaagtttagccgtcagtacgataataaatttgcggctgcgaatatctttatctacttcgattcggatatttcttgaaaaaccgagaatgatatttttcgggtgagtcaaaatgatgtcagacgcatcgtactgggaatcaccttctccgactgagtacggctgcagattggacactcctttgaccggaacgccgaatgctgaagacaaaccgccctgcaccgcaagatctcccagattggtctgacggtcagccacacggtctttccattcaatctccatgccttgagatgtgtaaaatctgaattcctgaggcagtcgcaaatattttgccggaatggcttttaagccttttttaaatgtggctctggacagctcttccccgtttccgtcaatgacgtgagatacagtctgcttacggattccgtcaagctgtgccaagtacggatcagaagaagatgtatcgccgtttacgactagctcctcaatatcgactgccgcccgctccgccaaaatctgcatgatcgtctgctgcaggccgtctttttcaatattgttttcaagcgtgtcataggtgatattaatttccgcaatgacttctttcgtattcagctgcaccgtacttgttgacgggacggtcagctgatcgtcagttaaggcttttccttcctcagcggcacgcagaatacgctggccgaaaccgattttttcaaatttctgcgagtcattttccatttgaatcacacgcgattcgctgaaaatggtcggcgtgttctgcaccatgcggataaatgctgaagcttgtgcggggttcattaaaccgccgctttttaaagcggaaagtgacatttccgcctttctgatgatatcttgatttctcactctacagttcctccttctgactgggcttaaagcagtccgctccaaatggattttttaacaggctcttgaccgcccgtctcttcttccggctgctttgatgcgcctcttactttttcaagcgcttcaatgcgtttaataatcggcgccagcatgtcctcaacaagtgttttcagcttttcttcatcagacggcgcagccgccccgtctttgtcttccgtgttctggtccaaactgtcaagccgctttaaaagcgggtgcagcgcgtgttcaatcgattctcttacgtcttcttttctcatcttgttcaagtcctctcccttgcggtttcttgatttgcggtcacggtcgagaaattgcttgactgcgccgaataagccggcttgcttttctgccggctcttcgtaaacgtcagcggttcccgccatgctgtagcccgtaatgataccggctttaatctgatcccatacttcatcggaagctttggtgacaagcacccaagatcctttccggatcacagcattcccgatttcaaagtcatccggggcgacgtacgactccaccacctcgccggtcccgccttcaaaattatgatttgtatcgatgttgcgggcgtccgccaaaaaaccgtgagcggccttttcaatctcttcagccgtcatataatcgccatgtgcatcggggacatccggctcgtaaacgatgccgtaaacaagcttctgctcatccgattcgttttttgtaaacacctgcacctttttttcaaatgacggaaggcctccggctgattttgtaaaaaagaattccgtttggttcgccgccttatcgacatagctcacaaaactgatgacggcatttctcaattctctcggcacgagatgttttcaccccctttcaggattgctcctatttccctttcagcaccggccggctgtagtactcttcaggccattcctcaagcgtcttgccgagcactcttcccgccagatcacggaggtcattaggagagaccgcgccggcggaaataaatggcgtaagcaccttcgcaatttcaagcggatcgcgaaaatcaggcccttttaatgtgagctgtacatcgtggagacccagttcaggcaaaaataacgtgttgagcttattaatcagcgttttccgctccggctgaaacacctgctcctccgttattttccgtgccgtatcggctgtggctttgttgtattcctgcgcctctcccgtataaagcggcgggagacggaaagcggaacggagtttatttctgcttctgtcgtcatattcaagaaacagcgcatcatcctgcagaatttccgcaagtgatttaatttccacagacacgggcgtaatgtcttcgcctccgtgaaggtctttttccttcgcaatgccttccgcctcaatcagcagaaatttgtgggcgttttccaccccttccaggtcattcatataatcctgaagctctttgtacgaggtttctgacagcatgccgttttcaaccgtaatggcggccggcacgtgacggccctgcttgaaatacataaaattcagttcttccgctttccgggcgccgtacagattgacgatattgccgacccagcgcggaatgccgtaagtgccgctgccgatttttaagtgaatggcttcatttgcccggtattcttcagacagggtctttacgtattcaccggttctcatgtccatcatgcggggatcgccgtattccttaaaaaacactttccgtccgttcagcatctgaacatatttacggaaccgtttttgccttttaatcgttttggatgcgccgttttcttcatatgaaaatgtaacttcaacgggatcagtcacaccgcagacgcgcatatgtttcacatccagatattcaatccccgccggttttcccgcgccgtcccgaagcacttcgagaaaaccgttgcccgttttttcgcggtcttctatcgcatatccgaggaccgtctcggccgattcatcaaaatgaagacatttgtaaaagctctccagcttcatccagtttttttcggcccgggcctttttagacggtgagcaatctgggctatttacatcaaaggtatattccacatcgaacccaaaacccgtaatattgacccgatacgcgtcaatgcactgctgaagaatcgtcgagtattcggcgattgttttcagttcaatgagattatagggcggtgaaatgatgtcttcgccgtacagatcggcaaattgatcttcgttcatctgccttgcctgcggcgcggccatttttgatttaaagacggtggctctaacgttttgatagttaggcaacgcctatctcctcctttcccgattcggacgtctccgtttttgtgatgcatctttcagatccgccgcgtcatagtcatccagcgcataccaaatggctgaaagtgtgtggggatcaattgaaaactcatcttccgacagaacgccgtttttgttttttgcgtacgttaagttctgcaattcgcggatcgtattttcacagctgtctgagcaatagatatgtttgaaccgtttcagcttttttgtatactgaagtcttgagcccggaaactttttggccgcaaccatgcaaaatccctgcctgcggaaatattggatgcttttcggctcagccgaatccgctttgatcagctctttttgatccgccaattcttgaagctcctcagctgtctgatcatcggtcattttgtttttgtaatactcccagaaaatataaagctctttttgatccggatcgacggctagccggatgaccgcattgtatgactcttcaaaaccgaaatccatgccggtccgaaacagggggcgcctgatggacgcaatccgctccgttacttcgttgtgctccatgacctgaaactgcggaaacacgcggatgccgttgacgccgaaccgtcctttgcgggcgatccggtacaaatcaggatcgtaatgccgtaagctgtccagctgcttaatatagcttttcggcaaaaacagattatcgcacgctgtggaatggtggtaatacgtatctcccttaacgacggtgcctttttcatacagcgtctgatcatccaatacgaaccgttttttttggtcatcacgaaaaaaatgccggtacgtccaattggaggtgccgacgggatttgtggtgcatatcatatgcagcgaaagctcgggatgacgcagacggccgatcagctccttaaagccttcatacttcacttcagagcattcttcaatccaaatcagtgaaatatgatgaatggatttcaatttggccgggttgtccatccctttaaacataatccggcttccgtttgaaaatctgagctgcatcggtgaagaaacggcctttacggcatgtcccagttcaagctccgtgataatgtcttcaaataaggcaaacgtagaatccctgtgcgtatcgaaaacttcccgcacgacaagggccgtccgcttttcacgaagcagcttcaggatgattttcagcgcggtatgatagctttttgacgagccgtagcctccgacgagaaattggtacgtttcattccaattgaacaaataatcttcaaagcgcgggttgaccgctttttcaatcatggccgttcctctttccgcgtaatgacaatgtcaatcggcttttggctgtcttctgttttttccatcttctgctgtgccagctttaatttttcattttcgattttttgtttaaattggtcagggaaaaggtcaaagtacaaggacagcttttcaagagccttcatcttgtccgcaagctttattgcaatgccttctttcccgagttttgcttccgtgacgatggttccgtccagaaggtgcgaatctttaacgtcaacgtagctgatctcctgcataatcggattatcattctcgtcaaagagcggccctgattttccgaaggcctgaacctctttttttccgaaggttacataatcggtaatgtcagcgaaagcgattttcacatagacttgaagaacgtccatcgcttcgacaaacactttattgaccatttcctttttcatgcggctgatttctttagcgactttttcgttttttaacagcctgcttcccgtcacatgcgcgctttccggtgaatacccggcttttatcgcagattgggtggcgttaaagcatttcacataataaagacaaaacagccgctggcgttcgtttaactcatcaccttcgcccgggttgttttttccgccgctttccgcgttctttttaagcgcctcgtcccagcgcccttcttttttccatctgccgattgttcttgcggatacgcctgatttgccggcaagggcgcgatttgtgatgcggcctttatgagactgatagattgtaaatgcctgttctctttttgcgtttttcatgctacggcatcaccgccacctccgacatgattgtctataataaaaagcggcttctaatcgggccgctttttgtgatcgtctgttcacttctaggtggcaaacgtatgacaacttatgaagcaggcgattgatttctttgttcctgctgtttttgaattttcagaagcgcccgtttgaccgtcgtttgtacggttgatttctttacattcagcaaggcggcgatccgttcatacgaaaagcattccgctttgtggagcagcagcatttctttttctctatccgttaaaacggctaatgcgtcccgcagtctgattctgtcttcttcagtcacatttgcggacggttcaaacatcagcgcctgcgaataggtttctatgattctcggatctttaatgagcattctctgataagcgtctctgcggtctatcgctcttcttatgccgggctgccggcctttttcaagccattcgatgacatattccaaatctgtaataatcgttctgatgatttttttatctttcagttcttctgaagtaaacaccgtttcatccgctgcctccagctgcttgtaccactttttcgtctctttcagcgtgcgtttatattcaaatagtaagtcttccatgtagatcctcctctttttcggaacaaaaaaggacaccaatcaatgcgcagcatgtgcgcgattgatcagtgtccgcaggctttccgtcttggacgtattctgtttttttcgattaattcaatttaaagccgatttcatattcgacccgggccagatccccttttcgcgtttcgacaagcgttttgccgtgctccggcgcttcggcgagccatgcttccttcttcagtccgtctactataatcacccgaaccttgccttcttccagctggctttttaatgttgtatgttcaatgtcagtcagttttttaggattcatgttttacttcctccatctttttcaaaatgttcacttcatgtatgaggcttccgagctcatttatgaacgcttctttttcttcagaactttctccccggagcaggcggagagccgtttcggccgcctcaaagagttccggggctttcgccatcaatgccgcgttgatctgctgtgagtatgaacttaagttgaaaacggccgcgatgagccttccgtttgaataagggaacttctctttatccgcttcgctgtaagcggaataaatgtaaatgggtttttcttctccgctgtgtacggcccgccatggagcggggctgtttttttcttgcaatggtgatcctcactttccatcagcctcatgccatgcttcaatttgcttttctatccgttttgccctgaacagcaggcaaaaaagccatttgatatatttacacacgtgcatcaagcctcgcttttgcgtcttgaaccattcgttcaagccgtttaatgaccggcgttaaatcagtgcctgttttgcagttcgggcaagggtgaaagacagcgccgaaacccgtttccatcacaatgaccttcttcggcccgcacagcttacacattatctcgccccctctaatctgtggtttacgtcaaatgaattgccattaatgatgactaaataatcgctgcacatctcataaattcttgtgcccaaggcttcatcaacctgcaccaatccgtcacaggccagctcgctcgagataagaaccggcttatgatttaaatagcggtaattcacgacggcgtacatttgttcaatctgccaatcggtcgcccggggttttccgttcagcggtttgaacagatcgtcaataaaaagcacatccgcctgtttcatacggccaagctttgcatcgagcagatcaaaatcattttttaaatccgtaaagccctccacaaaaggaaaatacagcaccggtgtctgcttctgtctcatgacataattgctgagagcggtcaaaagatgggtttttcccgatcccggacgccctaaaagggcaatgctgtttttccggcagtttttcatcttgtcgaagttctcaacatattcaagggcgcactcatatgcgtcgacgactgcctgaggcttgccccgcgtgataaatcctttgaaatccagcttccgaaaggcatctgtaatctcacttgcgccgagaatgcgttctactttccgttcggcggcgcagcggcacttaacccatacttccattcccagctggtttttgagataaccgccctgatctttacagagcgggcagtcaaagcggcttttgtctgattcttccggtctgtccgccagtaatggacgttttccgtttttcaggtcggcaagaatctgctcgatcgttcgttttgtcatgtatcgtattcctctctttttttgttgtgattgtccttcccgcaattcgtgcattcaagcggtcttccataaacttggcgcaatagctgaaagccttgatcgtttcagctgaagaggtgcgccgctgttcaaaagcggtaaagcattcgccgagccatttgattgcttcttgtgctgacgcaccgagggaaacaatacgggcgatggcctgataatcccggggcgacgggtatacgctccgcccctcctgtgcagaccttaatctgataaaatgggcagcaatgtcgttaatcgcttcttcagcagtatgattttttgttatatctatttctctccggacatttttgtcccggtgatccgccgatattgtccggtcagttgcttccgggcgggttaatgtctttttcggcgtgaatcttttcgagtgctttacggagacgatgagtccgtaaggggcgcggacggttttgatatactcatgctgttccaagctctcgagccaccgcctgacggttttttcgctgaccgcgaatacatcggccatttctcttgcttttacgggcttatgtccgaggacgatcccccactttacgccgtcttttacatgttcctttgtcgttgagctgatgaaccataaaaacagccaaatggcggaccctattttgtcataatgttctgaattcaataatccagaatagatgaaaaacgggtagcttttacgtttcataagggacatctccatttttcttcagacctatatagcgttcatactgcaatcggttatcaaatcggaataccggtagtccgcaagcggtaaaagatatcgaaccgcctgcttttcctaaacatctctggtcagccggattgctgctgaaacggatgattatcggctgcatctctcaccctcctgatcaatttcttatcgtattttgatacattttgtatccctatgatgttgattatatacgatacatttcgtatcatcaagacctttttgatactttttttatcatctctttcttttgatacattttgtatctataatcataagtaacttagggtgttgaaaaaagagaggtcatttcggatgataggcggaagattaaagagtctcagaggtaagaaaacgcaggaagaagtcgcaaatcatatcggtgtctcgcgcgccagatattctcattatgaaaacggccgatctgaacccgattacgacacgctgcaaaagcttgcggattatttcaaagtgtcgactgattatttgttaaccggaaaagaaccttcagatgaagacatgtttgccgatcccgacctgcagatcgcatatcgggacatgcaggacttttccccggaaagcaagcagcaggccattgaattcattaattatttaaaagaaaaagagaaaaaccgcaggccgaaacataaataatccgctcttttcctttaaactgcttaacgttcagccgatataaaagctgaatgtttatttttaaaagaaaagggaattgattcaaagtccgatcagggcttttctttctcgcttaaaaaagaacatatgttcgaaagggtgtattcaattgggcgattttttaacacatcttgaggaatacgtcaaaaacttatattgccgcatgggaatgaccgcccctctccatattgatatgcagatgattgccaaggagcttgacatttggattcattttgaagatacgcacagtatgatgctgaagcgggacggcatgtacagcatcgtcctgaatcaaaaaaagtcacccgaagagcaatggcaggattttgcgcacgaactgtgccatgtgctgaagcataccgggaaccattttcatatgaacaagctgttcagggaactgcaggaatttcaggccaaccattttatgtaccacttctgtgtgccgacctttatgctgttaaacatggagctgccccagcggaggagccacgccgttattttaatcgcagccgctttccgggtgacggcatcatttgcggaaaaaaggctcgagctgtttgaacggcgtaaagcaggtattcaatttcagaagcggctcgcttgtctgttatccgacaagcggccgaatgtgtattatggaagcggacagacacacttgcatgccgctgaagaaaaaacgccgtattttattgaaaattagcgattctccgccggcttagaacacagccggcagaatgtcatcattttgacatcggagaaaaggtttttgcatcatgacgctgtaatcaccgtgctgcccgccaagcacttcatgcgccgcatagctccagtgaatgtaagaacgggccccctgttcatttatcataaaaaccggccttcacggtttctacataccgaaaaaacagatcggttggcgtgtatttttctccccggcagccaaaattgctgaacagcgcgtgtctctgcgccgtgctcacttccaattgcagccccattttcctttttgtccgattgacaatgttgccgggatttaaccctgccagccgatcattcttctctgtcagctcggcatcaaatcccgcttcacgcagcagatcacaaatcagtcttgctttttccagatccgcgcccccgacgagtgtatttgcctttttcagatcatgatacccgtgaaaagccaatgcgtaatgatgggcggtcactttttctaaagccagaggctcgtcaaagcgtgtgcttgtcaagtggagagaacggttatcgcaccgcttcgtcccttcaaataaataaattgagctttggtcagaaaatgcatgcaccagctcactgacacccggctcaatcctgccgccgtggggagcgaggacgatacatttacttccctctttttcttcataaataattctgtattccgattcagcagcggaaagggctgcgaaattgtcatatctatctttcatgtgtaacatgctctccttttccagtcagcaccagtttactctactcatctgggaatggaaacctttttatagtatgatttgatagaatacgtatcagggaggagatatcatggggttcatcaacggattgctgggcaatgcgtcgacaatatcgacggctgaagcaaaatcagaactggcccgtattttgctggaaggcgagaatgtcaatgccgcatttaagcttgtccgagatatcattgtctttacggataagcgtcttattcttgttgataaacagggactcacggggaagaaaacggagattcaatccattccgtacaagagcatttccagattcagcgtagaaaccgccggccgctttgaccttgattcagagctgaaaatttggatttcaggcgcggaacttcccgctgtctcaaagcagtttaaaaaagatgaaagcatttatgatattcaaaaggcccttgccgcagtttgtatgtaagaagaaacggaagcccggggagcttccgttttcttgattacagtttttcttcaattttcgccttcgttttcgggccgtaaattccgtctgccgttaatccgctgacggattgaaaacgttttacggcatttgccgttttcgggccgtaaacgccgtccgccccatgattttttgctcctttatcgggataaaaataaagtgcggataaagcgttttgcacttgttttacgtttgtccctttcgtcagcggtttcgtcactttgatcacaccggatggaagcggatatgaagacacagcctgactttttgaagaagaacccgtctgagcgagcttgatcacttgtccgactgtaatgtgattcggatcggtgatatggttgatgctttgcagcgattttacgctgacaccgtgcgatgcggcgatttccgataaggtgtcgccttttttcacatggtattcagacgcggaagaagaaatagaggcttttttcgccggcatacttccgcttaatttcttttcaatcttcgccttcacttcatcccagcggccttcagacaaaatgcggtgcgggcagtactttccgttccagtcctgatgctttctgattctgtcaatcccccagccccgttctttcaaaagctgcgccgcaaacgcaatcgccagttcttctgcggctctgtaccgttcgccgcctgacttgctgtaacagatttctatagcaatcgacttgcggtttccggtaccgttcgtgccgtctcccgaatgccaggcattccggtccaacggaattccctggatcacttctttgtcatcaaccgcaaaatgatagctcgttgattcgctgtttcccgtcatatagctgatttcattagcggcggatgcgtcgtttgccgtgttatgaatggtaatatactccggcgtcatcggattcggacattttaacgcatatttatcagccgatacgagccgttttttcacttcaatccccactcttcatctctccttatgcctttttcatcaataggtggcattcgtaggacagataacttgagcatatcgaccctgcattcggataaaattggaatggacacgcatgcaaaaaataagacccttccaaagaagggtctttatgttatgtttggttgcgtgcggcaatatggaatgtgccgtccgcttggttttccaaatggctttcatggccgatcacctgtgtaaagctgaacccgacagcaacaagcagcaatcctgacaacagtttagatttcatatagacaatctcctctctggatttgtttttgggcgtgcaccattttttcataaaacgtgagcgctttttcaggctgtccgtgtttcatgtaaaatttggcagcgtcatgcgccaattcttccacatacggatacaacatgtgttcttccagaaaatcaaacgtgtgcctgacggatgcgttatccatttccttgccgtataacgcatgcaaaaattggaacagattgacaaacaattcatcattgtattcgcgggcgatactgagcccgaggcgatattgcttctctgcttcggctgtagtgttctgtttataaagaacctgtgttaatgagtaaatagaatgcggaagattatcgaacttttctgacctgcaaatggaaacggatgtctcaaaatattcggctgctttagagaggtctcccattttttcgtaacagtttccgagattatataaggctgaactgataagacggggattgccttcttgttttgcaagatctaaagcaagttctaagtggggcaatgctctttctggatactgcatgtcatcataattccctgcaataacgaattcacattggattctgcggacgttgtacgtctcatacgattggtacgtttcaagggcttgaacggcataactcatggagacgtaggtttgtttcaggttgtaaaaaatctcggccattttaaaagcaaactcagctttctcgatgtcatcagaaacgagtgcaaggtttttttcagcccgtttgtaatacatcatggcgtttaggaacattttctgtttaaattcgtacattcctcgaaaaaaattaaagtagtaatcaagcagtcctgtcagtttatactggttgccttcaatgtcttccaataattctgaaaactcaggctgagaagggtcctcctttaagggcttgatgtaatccagcatgacgcggtgtctgaattccattaatgaataatacagcagcagatcctgatcttcttccatatcctcaatctctctctctacttcacgtttgacgcgctccgcctcaaggacgtgaaactgccggatatgggtataccattcattaattttgagcccgacaaaagaggacggaatagtctgcttcatcctcaataaatccccccttttggaatgaccgagatatgtcatattttatcataattgctagaaaaagaagaacgcaaaaagaccgcaattgtcgaatttcggatatccgcaacgatttatctccatcacaagcttattgcttgtttcttccgtgccgttgatatagcatatccttgcagcttttattctgtattaaatgggggttttcacatgacagcacaaaatcaattggtcagccactttctgtcacatcgaaacgtgacgattgagctggcggaaaaaatcagccgcgagcattacgactacaagccggcggagacatcaatgtccgctcaggaacttgtaaaacacatcgtttattcttttcttatgtttgcaaacgtcattaacgacggaaacgggtcagctatccagaacaaaccgaaagaagaagcggaaacagacctcgtcaaactggctgaagcatgtactgaaaaaacgacagacatcctgtcacagctgactgaagagcagctgaaccgcgaaattgacctgactgcctctttcggcagaaaaataaccggcgcggctctccttcagcttgccatggagcatgaaattcatcataaaggcaatcttttcgtgtatgtcagagaaatgggccacacggaacttccgttttatcagcaaaaatcataatccggccatcatccgccgatctgcgaaataacagcaggcaggcggattttttgttctgtataaaattttccgaaaatttaattgattaccgcctcttaatcatatataatctgataaaaatagtaggattattcaggaggcacacagatgactgtaagcattgtgtttatgggtttctttgtcggaacgctggtcggattgacgggtgtggggggagcggcgcttttgactcctttactgatcgttttggggatcaacccctcaatcgccgtcggcactgaccttttatataattccatcaccaaactgttcggtgtcgtttctcattggaagcagcgcaccgttcaatttaaacttgtcggctacttggcgctcgggagcattcccagcgcaacagccgccatcggtattcttcacttgtttcccgcttttcaccagcatcaggagcagattatcaaacaggcgctcggctacgtgctgacccttgtcgccatttccattatcgcccgcctttttttcgataaaaaactgcggccgaaccgctggcagcaaaaaacacttgaagaaaagcggacactcatgatactgatcggcgtcattttcggcttcatcgtcggcctgacatctattgggtccggctcattatttgcgatcgccatgttatacctgttcagaatgaaaacagcagaagtggtgggaacggatatcgcacatgcctttttgctcgtaactgttgccggtctgttaaacgcaagcttcggaagcgtcgattacctgcttgtattgaatctgttgatcggctctgtgccgggtgtgcttctcggcagcttcttttcgccgaaattctcaccgcgcccgctgcagtttgtgatggcggcgattattttaatcagcgggataaaattaatctaaaaaaagcgtcctttacaggatcgcttttttatttgggaaatccccctcaatccaaagccaatggggtgggaatttctttattaactaaccttaaaagtgcatataattgtccggttttccctaacatcataccaagtcccgaatgatcatttcttattccattttgccagccatttttcaacagggtctctttaaaatggttaacccatatattaattgtattctcaatctcttgcttgcgatttttaaagagagataattccttaatagcgtgaagtacatctatattccccatcgttccatggcataatgagtagccctgacgatgggaatttccattcagcaatgtgtcatctaaagactcattaatatacccaacgtgaatgcgcccgtctacattctcgtatatcctgcttcttccaagaagaataccgcaagacccgtgacaccacattgcggaagaataatccgactcattttttctgttatccctccatttttttattttagtatcaaaaaatttatcttcgtatttgagagctgattcaatcagtctaagtacttctccagatgcctcaatatgcgcataatattcagatagtgcataacaaatcccagtaataccgtgagaaaaccctgctaaaacaacattctcatccgcgtcggatttccaatatgcttcatttctattttgaatcattcttttgcatatttctttacaaactgcccttgccgtatcttccattaattcagtccgataatacctgccaagctgaatcacaacctttaatatacctgcgagtccgcctataaaatcggtatgtgttatttgagcggtttcctgacgaagtttctctaagtatgctttacacatactattcacttcattttccgaataaagtccggtacctctcattttattgacaaaatagatataagaacttgacccgtaaaaagcagagaaatttgttttataaatactatgctcatatatttgattaattgaattcactattttacgaagaatcgatttgactttttcatcattataaataaaatcataagctgaaaaataaagccccactccagctaacccatcgtacagcccaaaactcaacggtcctacggataaggtgccattgggagccgagactattgatacccattgaagatatttctccgattcgattgcttgttttaatatacaatctgtttctatttgaatcagctctttgatttgtatgtcattttttaaatatccaggtacaaaatcatcaatttgatttttataaataatatccaaattagccgccgtggagcttaaggccatatttatcaagctcacttgctgatgcatgtcttcttccgacatattcgctaaacgagttaaaacttcttgtttagcgctttgtttcataatccctgtatccaccacatgtattgaatttgaataaacccttttttcactaataggagcattaaaatagggtatatcaccgatcatcatatccttgatctcaaatggactgatggaatcaaatacttcatattttgtataagcatccttaataaaagataaaacccttatcctttctccataatcttttaaatacataggatggaggagggtttcaagaaatgaagcgtaaacatatgtaggtctgacaataattctaataggggcataatttaattcgcttataaggttccgtatatataaatcttctttcaaaatcaagaatattcttttgaagccttcaataaattctctttcaaattcaaaacattctgctactttatttttgtaaacaggaagattccttccccttttgaagagatattgtttctttcttatagaaattttatctgtttttatatgaagcacttcttctttttcacctttttgattttctgtgtttatcaagcctcctatattagtcagcccattatcttccggaaaactcatatagttaaaaagtgcagattttaatattgttttatttacctgtgctgatgccattaaattaacattttccttgttctcctcagaaaaaaagaggctgctttgaaacagagtctcaagatcaaccaacactggtttatcacgacatgctatgatattttcaaaatgaaaatctgacccttgaaaagcataaataaatcctaaatgcattccaaattggtaataataatttcttacctgttcaatattatcgcacggttcagactgtacatactcttgccacccgtactcaccttgatccaaggataaaggtgtttttaaattagtttgataatactgattgacataatcaatgaccttttcataaaaaacatcaatttcaagtgaacggggtttataaacgagtttgttattctcaaattcaataataacaacacttttaccgccattatgaacatcccctgcattcatattaacctttctcatttttccgaacgaaaagttgaatttttgttggatttttttatagtcattaacccaatgtttaataatagatatagtgaagcgtataaaatcagaggtggatctggagattaaatcttgcaatacaggataattattgagtatttcttcaacaaatgcggagtttttcagcctttctgagaatatatcataatttttagattcatttttttcatcaaactcgtcaaaagtttgatgaaactcatggataagtgttttccccgccaaatagtatatttttttcttataattaattaatatcgattcaacaagacatcccttatccaacagactttcggatggtattctatctatttctttaacaatctgagctttaaaaatacttatataatactgcgcaaaaccttcgaaataatcctcttctttaaaaatattcaacatagagttttcataaacatagttagccgaattctgtgttttgttcacaattatcacttccttatatattcttgactgtctttgacaaaaaagaaaaagaatatgtacgcatatacatattctttttcggatatgtttaatcgttacatggactgacaatggacgcacactttgtcgtcggacagcctgctaaagagattggtattgtgatggttgtcggcgttacggtcatcggggttgcatctgaaccccctgcaaggttttttaattcttcttcagtcattggagtcagtgcttgaaaatcttttttcatgttaattcctcctattgtttgagttttttataaatttcagtcgttacatggactgacaatagacgcacatttagttgtcggacagcctgctaaagagattggtattgtgatggttgtcggtgttacagtcattggagttgcctccgagccccccgccaattcttttaattcttcctcagtcattagttccaatgctaaaaattcttttttcattaaaaatccccccgattgttttttatacttgcctttgcggacatgcgcagcctactgtgatagttggacaaacatgatttgttattggaattgttgttattgatactgagttttgccctccaataagctctcttaattcttgctctgatgtttcatacaacgcgctgaagttctctttcatattccatatttcacctcctttcaagttaataagtctgctggagctgtgattcatatttggtcttaatcgtctttaagtttccattttcaatctcgtagacagattcggagaattcgagccattcggttctatgagtaatagaaattacagtgatatcctttttgtaaatgttatttaatatatttaattctgtatccttatccaaattgcttgttccttcatctataaatagaattcgcggatttttcgctaatactctggctattgagattctctgccgctgtccacctgataaggtaataccattttctccaatcatggtatgataccccataggcatttttataatatcctcatgaatacatgcttcttttgcagcttgtacaacttcttccattgttattttttcattgaaatattttatattatttataatagtgtcattaaacagattgacatcttgaacaatataacctaacgtttctctcagcttaaccatattaacgtcctcgattttgaattcaccgtagcaaatttctcctgctgttttttgataaaggccggcaatgattttaatcaaagtagactttccgcttccagtttttccaattaatgtgattttttctctcggccggatcattaaatttatattattcaaaatataatcgtttccgttgtagctgaaatcaatatttttcaagctgatattatgagcggccgggttaaatagttcaatgcttttatcatttacttcctcatctttttcatccagtacagcctcaaccctgtctaccatttcttcaactaatttaatagactctaaactgccgataattgatcccagcggagacataaaccgtccggcaatgttagaaaaagcaattactgcgcctagcgtaaggcctatagatactgctgaccaagtacccacaattaaaataagtaatggcaaagatagattgattgcattggagaccgcacccagtaaagatgaataattcattcttttagagaaataatctaactgatgattaaagttataatttaattggctctcaatattcctggtttctcctattgtttttataaatgtcattgatcttaagatttcgattagctggctctgaaaattggattgactatttacttcctgttttgtgaacatttcaattttcggaagcaaaattttagtactcatcacctgtatagctgctcccaataaaactataaaagataatatcggagaataaacaaacatgactatgaaaaatacaaatataagactgatatctaatatcaaagtagacgctaacctggaaatgacttcacgaattacagcaatgttatggattctagttgaaatatccccggcagtattcgcctcaaaaaactttaatggaagactaaatattttatgaattattttatcagtcatactcttattaatttttaattgcagtttgataataaatttcattctgattaaggacagactaaagaataatacgattgaaacaattacaatcatgaaaagcattggtatgggaagaattttctcatttccgtcaataaatgaatcaataatatattgagtcaaaaaaggggtcattaagtttaatgcttgaaaaataaaagtgaaacttataataacccccaacaattttttatctttcaaaagatattttccgatctttctaaatgaagacacatcttttaacgacgaagcagtcttatcctttctctcaagttcgttctttctgattaacataatagaaatgccattatagaaggttttgaactcttctaatgtgattgtcagtctgccagacgaagggtctataattttaacgttatctgtgccaaatgcgtcgacaactacaaaatgattatgattccaatgaacaattagcggatggtttttatttaactctttaagctgcgttatattgtctgtgcggaatgctttgaaatcataatcgaatgtttcagaaatccttttcatttctattaaatcagtgccgtctcttccgataatttctttatttaatttcaatttgttaggattgatttttattccctcagccctgctcaaaaccatggctaaacaagtaataccgcaatcaaattgatttctttgaagaataaccggaagctttctttttctaattttcataaatgtctcctaatgtatctacacgtcctatttcaagattgagaatattcggcaattctgcgtctgctgcatacagcattccatatacgatccccgctaaaccaagcattaaattaggtgtttcaacatcccttccaactccgcattggtagaaacctatatttttgtcttgtacactctccaaaatcaagttttttcctatatttacaaattgactttcaccagtcttttttccatattcgatcagtattaaagcatttcccatgtctccgtgacaaagactttgctctcggccaaaaccgtcataaaaaatgttagaaacggttttattcagatcttttttggccacttcggcaatatcagggtgttttgaatctttcaattctaatctgcttaatagaattccaggggatccatggcaccatgcagatgttgcagcttcatttaccgtttttctcagatcaagccagttaccgtttactttttttgaattttcaaaagcaagtccttttcggatgtacatacttatatcttgatgttttgaatgtttctcgagtaattgaagggcatatatcattccagcgtttccatgggaaaaacccgttaacggcttatttgcaataccttcccaagtgacaaaatcctcatcaagaaagatcgcttgtttcattaaaaatgaaccgcattgttcagccaatgataaaaagaatgtatcattctctatttcaaacgaacgtatcattacaataagagcccctgctgtgcccccgattatatccaattctttatcataaggaagcaaggacggaataagctgagcgatttgttttgcattctgtttatatttttcgcgtttagtatacatatagaaattcattaaagtatatactattgaagacactccggaaaaagcacctacagacatactgctgtcttcgtccggtttcacctcaatatcaataaaacgagagatgacatctttcataattttttcggcaatgtccagatacttttcttttttcgtgacgcgccataaagccaggtaggtgaaagccatcccggaaagcccgtcgtaaaaggtatcacccataacggataagttccattgaatttcatcaactccaataggagtagcgttaagccaagaatacgaacttcctttatctgtgtgtgctttgtaagattgattataaatataagcggccaattcctctgctttttctattaagatactttcttggttactactgaaaacatttacatattgtcctggttcttttgttataaattctttcaaaacaatttgccgatcatcctccgaagcaagcattgacagttcgataacatagagctgaaactttaaatcgtcttttgataaatttgaaattctttcttttacactttgagctggtgtttccggaaagtaattttcaattttcttattttttgagcttagtaagtctttctcattcaatttcactttgaaataaggtatatcattattaattaaatcgttgaactcatatttaacaatagattgatattcatcttcttgctttggtctctcccatatttttgataagaaaatttctctatcaatagagttgtgtaaaaatctaggatgaaaacttaattctaataaagcagaatactttattgtcggttttgatataaaccgaacatatatcttgttttcgctcttttctattatgcgaatcagctccgaagcatgttttaatatagtcatatatgcttttgaaaaaccttgcttcagttcttcgacataatcttttgcatatacaaatttattctcaagcatagggtgattattagctgtatcaatttcgacatagtctcgtttgacagacatttctgctgtctttaaattgataagctgaggaactttaatgatcgactttgctttccctttccgacctattccgctgatgtcggctttgcccgcaaagaaaaaaggaagcagccctaatgctctgacagattcatgaagctgcgtttcagctttttcataagcgtccatcccatccttttttttctggtatgcaggatgaaataaggattccaaatcaatgagaactggatagctgccgttggcaatgagattttccgaatgaaaatcaacagctttcaatgcatataacaaaccgatttgagctcctgtacgctgataaaagttttgaacatcttttaaacaattgcatgctttaaaagatataaattcagtccatccatatccgtctctgctaaggacattcggagtgctcaattttatatcatgatctctaattttctcattcaaaaattcaattatctttttatataatagatcaatttctaaacttctcggcttataaataagtttaccttcatttaatgttattttagtaacctttctcccatcagaatgagaatcacccatccctacttcaatgtcccttattttgacttgttctgaaaaaccaaataaagagagcagttcaggcttgtccttttcaaaacgggagataaattccagtatgaattttttgaattttctcagttcatttccaatcgctcttaataagactggatatcgttggaaaaagttttcaagatactcctgactgcacaaaagagttttattataatcaccatatttttctttaggagtctcccctgccaaaaaacctttttcccgattcatattcatatccaatacaagtgttctataggatacttttaaaatgattttttctaattgatttgaaatactatgatgaaaaagagccggttgttccagcagatagtcataagaaggaaactttgattttttaagtagatcattgaagtaagaggacacttttaacgcaaaaacgtgaaacatgatttcttcatttacgtcttcttttttaatagcttggtgagcgatccctttttttaggttttcgaaaacatgaactgtaaaagcggatttatgtagtggggtttgatataagcttttcactttatcaattgattgaatggataacacattataaatgctttcctgggccatttgaatatcattcttatagattagttctaagtttcgatcaaacagtttctcattttcatcaaattgagagacagcagcttttttttctttacttaatagaatattagttagcgaattcatttaatattcatctcctttaaaaaaagagggagacagctggatctcccagagcattggaaatctattttcttatttcgggttgttttaacaccagcaagtgtgagtaggacaaagaccgcattcccaagttaacgtacaaagcttaccatcatttccttgagaaatccctcgctgttctgcgcctcctcctccgctgaattcacttaaagaaatttcctcaagttcttctcttaaatcaccggcaaaacgatacattttctcattcattaatattcctccccttgatttttgaaatatattggattttgatccatatatttctataaacctatgataaacgatcttttacctataggcaccgaaaagtcatattcggaaaagcgctttttttttgcgcgtttccgaagtataggttataaagaaaatcgggattaactgttccgttaatcccgattcatttactcatatatagttttcatagaaattaatgaatatcgatttgctttgatcagtgcctctgttctggattttactccgagcttgttgtacacaccagtaagaatgtattcaaccgctctttgactgatcaacagctttgctgataattcccggtttgtcattccctccgctacgcccgctaagatatcttgttctctttcatttaaagtaatatctcttattctatcttcaagcttatcaatgttgaacgtatttgcttctgttcttcttaattgtttaaagagatgagtaggaataatggtatctccctcaatgacactttcaattacttttatcatatgttcttctgttgatgacttacttatgaacccggaaacaccaacttcaaccaaaagattgaaatgcacagagatatcaaaaccagtataaattataattttttgatcggggctctctctaagaatcatttttgacaattccattccatttaactccggcatatataaatcaagtaaaattaagtcatactcataatgcttaaggtgattaagtacttctttacagcaagacaatattgttactcccattttattgcttttttcaagaatggcttttgtcccttgagcaacaccaatatgatcatcaattaatagaatctttatcatgtcagcgctccctattcatttttcgtacttatttcaaaccttaacagcaatccttcatttacgcttgaagatatattatgaataccattcatacaatttatccgctcttttatccctgtcagcccaaaactgtttgtttttgaatttactttattccaatcaatgccgattccattatcttcgtaaacaaacataagacttgtttttttttgaatcatcgtcaaaacaatataactggcttttgaatgttttacagcattagtaagcagttcttgaacaatccggtaaatgtttattgtgatatcttctgtaaaaatagaatcatcttttacatctacaaagaattcaatatcaagctgatagttgcttttatgtttatcaatcaggacttgaatgcttcgaagaagtcccatctccattaaaaaaggtggtcttaaatcaaaacatttttctcttatatactggatattgtccagcaaaatttctcttatgtaataaatatccttgtatttctcaacatgatactctaattctctgcatacaaatatcagctcttgaatgatagagtcatgaatatcctgtgcaagcttggttctctctatttctgaaattgaaaataaaaccttagaaagtacagccgacttacatttatgttgatcgtctatgataatttcatcaatttttttttgaatcaataatttgttctgaagtgcagatgctgtgcagaatgccagcattcgcagccaatctgcctcgttttcacgaatctttatagggtgtccttcatgtgataaatgaataaaaacaaatgtatcacacttctccccgataaacagaattgatccgctggcggtttcacgtatttctcctatcttaaaatttgaaatgtttatgttaggaacttgaatgtttttttctctcaattttaatgtttttttgtcatagtttataagagcaatctgctttcctgagagcacactctgtatttcattggttagttcttttatcaattgatctgcatcggatcccttttgacataattctgaaaaacggaacaggctgcgaagatatgtcttatttctgtcatcataggtaaagcataaacaactactgccgaatatacttagaacaaaaaatagactatactgtttaaactgtaattggctgtctgttataagcaaaagcataaaaaacaataataaggagaaaacaaaagcccttgcaaactgctcaatattaagcttcacccaattatctttcatttgtatccaagccccttactaaggaaaataagggaatccctttgaatccccttaaaatgaaaaagttactttacacttattaaaatataaacagcaaaggcaacaatgtataccagaaatgatccagtcataaattttacaggttttcttgaaaagtttagtacgcctcttaatccgtcattcaaaatcattccgaaaaaggtaaccagtgtaactcctaaagcgagcattgaaatcacaaaaataacttgctccatgtatactcatcctccatttacattctgttttttttcgaatatacgtataatcctgataaggataccaaaacatacagccccataatcagtaatccccaaactaaaagaattgaattggtatatcccatatcactttcagaaatttgaatactgaaacgataaataaaagaaaaaggaaagactattgagacatcacttgctaacagtatcgtcattattaaaaaggaagctacaccggttatcatgacaaccactagatttttacttaagaaagcaattaaagctgcaatcggaatggttagcaggctcaaagtagtagaagtaaaagatgtcgctattaatcttaataagtcgcttgctgagatatcttcccgaaaaaagaaaaacaaggtggataagtgaataatatgattaacagctgagattaaaaacaaaaatagaaaagctgcagctagctttgataatatcaatttgaatttatgatacggatatgacatccaattcaacattgtcctgtttttaaattctaaataaaaataaaaacctgaaaaaataaaaataatagtcggaaataggatcgaatactgattaaaaacaaacatataaaatttgttccaatctgtattttcgttcatagtcaaaagaccgattccgtttatgagaaatggcaaaaagcttagaaagaaaataacataaattgatttcagtcttttaagtttcagaaactcgttacgcactaacagactcatgacctttctcctttgccagcagttttaaataaagatcttccaaagatagcttaaatccgtcaatagacgccttgttaaatccccaagaatttaatttctctttcatttccgacggatgaattattgaaataaactcgaattgctgtttattctttgaaataacatgatccgcaaatttctcaatatccgcccaattaatacccgcttcagctggaattttgtacaaataaagatgttgcgtatttttcataaaggctgactcgaaaataatctgccccttattcataataagcaattcatcggccatgagattaatctcacttaaaaggtgacttgaaataacgactgtggttccatttttcattacctcttggatcaacatttcacgtacttctttaataccatatggatctaaaccgttcgtcggctcatccagcaaaagcaatgcaggagcatgcgcaactgctctggcaattcccagcctctgtttcattcctaatgaagtttgcgaaaacagcttatctttatgttcaaaaagtccaacctttcctaaaatctcatttatttcttcatcagaagctgatttttttaaatagttaagatgtaatttaatattctcaaaaagattcaaattttcataaaagccaggaaattctataatgcttcctatagactgaatcacatcattatttggatttccatataagtcatccccctcaaaaatcacttcacctgaagttggaggaaatatccctaacagaactttaagcaatgtcgtttttcctgcaccgttgggacctaataaaccatatattttacctttttccaatgttaaatttatatcatgtaaaatttctttcttttttatagaaacattgatacccttggatattaaagctggatcagcctttcccacttttcatcattcctctccgtcttgttctgtttataatataaacttacgaggttaaaaagaagatatagtcaaggttaatttacgtttaaatttctcaatataaaaaatacgtgaagcctctacggcttcacgtattcattgctgtttggataaataataaaaaccgttccgttttgattgctctttattttatgttcaagccccatttgtttaagcatcatattaatgatcgataagccgatcccggcgccttttctttcagatttataattcattcccgggcccctatcctcaattatgattacgggtttgttttcaattagctttgtctgtacggaaacgtattttcctgaatgagcatggcgcaaaacattttgaaaaatgttatcaagaattctcttcagccaagtctcgtctatttcccatacgatgttttccttcagatcaatatctattgtgaagtgctctttctcaaaaattggataccaagctgttaacgaagaacgtattatctttaatatgtcacaactctttttatgaagcggcaatttacctgcggcaagaagagaaaatgatgacaaattgtcaatcagttcgcccataaacgttattttatcgtttatgatgcctaaagaatgctttccattttcactgcttatttcattcttcaacgtaaatgtatgccctcttataaccgtaagaggggtccttaaatcatgagataaatcagcaatcaagttttttcggatttcgccttcttcacgctctttttgtctgctgttccttagttcctcaaccatctggttgaatgaatattccacttgacccagttcatccttctgtttaactgttacaaattccggtatgccgtcattatcttgttttttcatatgattccccaaagaaattaaccttttttgtattttcgcaaaaaacatccatgaattaatcacaaaaagtgaacagacaaaaatcaaggcgataaaccatatataggaatacttggccctcataacctcccattgagatcctataattgagcgcggagtttctaaaaatgcatatccgctgtcttcactcccatttacataagcactcagcaataaatatttcttttggttttgttccatcaatttaatcaattcgctaacgtgaataacctcaccctttttggccaaccgttctgagttcgaaaacatcacctttcccttatcatttatccatacaatatcagagtgtttatattgcttcatgtgcgggaaagcagacgtaatttcccgattggatttccctgaaaaaccttccacatcagacttccaatcactttccaacttgtttggttcatagtgtacttgcccctggtgatcaatcaagtatgttaatgtgacatagtaaagaaaattcacacctaaaaaggctatcggaaaaaacaaaattgaggcaacgatattaataaggtattttgttgataatttcattgtttaatcctgtatccaatccctctgatcgtttcaagaatttccggctcatttggattgatctcgattttttgccgtaaatgcctgatatgtaccatcaacgtcttatccccttcgatataaggctgctcccaaatattttcataaatttgttcctttgttaatatttgattgggatgtctaagcaaaagcaaaaaaatccttaactgcttatcagttaaaaatatttcctcatgactttgatgatttaaaattcttttttctttcaagtggacacttaagtgttttagcttcaattcatgaatggcagtcttgtcaaatcttcttaataatacttcgattcgagcggccagttcatcgggatgaaagggttttgtcacgtaatcatccgcaaatcctaagcctttcagtttatcttccagacccgttctcgctgttaaaagcaagagcgggatctgcggatgtgtttttttcatcctttgaccgattgtaaatccatctaaaccgggcatcattatatcaagcacgatcagatcagccttttctatatatgtttcgtaattataggaagaagtgagccatataatcatatagccccgatcttctaaatcatcctttacaaattggccaatttcttggtcatcttcaatgtataaaatgttattcattaggaccccctctgaaatatgtgactaaaaaccaatcttccataataattatatatattataaaaatctcctttatgtaaggcaccattccattattatagctcatagatattcacaattcatcaaggggcaaaacgataagtgaatgcgaaaaggcggtctgttgtcagatcgccttttcccttataacgtcacaccggacttaaagattgcaagctcccgaaaatcgtttttttcgttattgacgtattctccgcttgcaactttaataatgtattgaataaaatctctcacaatgtgatcttctgttgtttggtcttccgccaatctgcccgcattgtaatcaatccaatgaggttttgattgaaataaatcggtatttgttgatactttcacagtcgggacaaatgtgccgaacggcgtgcctcttccggttgtaaacaacacgatgtgacagcccgccgcagcgagcgctgaagaagcgattaaatcattgccgggcgcactgagcagtgtcaatccctttgttttcagtgtttcaccgtatgtcagcacatcagaaaccggtgcaagaccggctttttgggtgcagccgagcgacttgtcttcgagcgttgaaatgccgccttccttattccctggtgacgggttttcataaatcggctgctcgtgcttcataaaatattgcttgaaatcattgatcaatcggactgttttatgaaacacttcttcactcaccgcacgctgcatgagaatcgtctcagcgccgaacatctcaggcacctccgttaagaccgtactccctccctgtgcaatcaagtaatctgaaaatcttcctaataaagggtttgcggtgatgccggaaaaaccgtccgacccgccgcatttcaatccgatgctcaattctgacaggggaatctcctcacgtttatctccctttgccgcaaggtgtatctctttaagaagcgctgtccccgcttcaatttcatctgtgacagcctgtgattcgagaaatttcacccgatctccgttcacttcagaaagcgtttccttaattgccgccagctcattattttcacagcctagccctaaaaccagcacaccgcccgcatttggatggcgaatggcgttaatcagcatttgtttcgtattctcatgatcatcgccaagctgggagcagccgtattggtgctttaaaaccagcacattgtcaaagggggcaatgtctttcgcctcttttacgaagcgctgcaggattttctcagcgacgccgtttacgcagccgactgtaggcacgatccacagttcattccggacgccggatgtaccgttttctcttttgtagcctttaaatgtccggttctcatttgtaaaaggattgtcctcgaagcgcggtgaatacgtgtattcttgcacatcggataaattcgtttgcagattatgggtatgaatatgctcgccggccgaaatccgccttgtcgcacgcccgattgaaaaaccgtatttaatgatgctgccgttttcttcaatggtttgcagcgcgattttatgcccccgctttacagggtccttcacttcaatcgccagtccgtctgtatacagccgctcccctttgttaaaatggcgcatagcgagaagcacgttatcgtttttatggatttttatgacctctttcatttcacttccccccttattgccgcagcattcatgtaacgcatgcttcatcccccgcttatgaatgacagagagaaaaaaagccgttcgttcagtcagccccggaagatggttcagattctttccccacaatcgctcttctcctaatatagaaaatgccgcttgaaacatatcatctttgcaacgggaccgcgccatttgaaaacggttcagaacctcctcgccatctgccggtttgttcagcccgttccagtatgaatagatcatggcgctgaatgaaaataccagcctctcaggaagccggccctcctgttcgatataagccttcagcgtcggcaggtttcttgttttgaatttcgcggcggcgttaagggtgatgctttgcagataatgttggatataagggtttttaaaccggtgtaacacatctgccgcatactgggtgacaccctccatttgcagcacgggaaggatttcttcattgatcagctcttcgatgaatctgcccgtcacctcgtgctcagccgcttcccggacggttagcagtccgtataataaagccactggcgccaatgccgtatgagcgccgtttaagattctcaccttttttgtcctgtaaggcgtaaggtcagacgtgatcagtgcgttcagcccggcatcagcaaaaggaagctcattctgaagctgttccggcccttctatcacccacaaataataatgctcaccgaccacaagcagacggtcttcgtatccgagaaaatcggtaagttcttccgcggtatcaacaggaaatcccggaacaatccgatccacgagggtattgcagaagatgttcgcatcatgaatccattgagtaaaatcaggctccagctcccacagcccggcatattgaagcacggcagccttcagtttccgtccgttttcttcgaccagttcacatggaagcacaatgcaccctttctcggcgtcacccgcaaatgccttatagcggaaataaaggaacgccgctaatttcccggggaatgttttttgaggcctatcctcaagccggtcgcctttctcaaacgtgattcccgcttctgtcgtattggagatgataaaacgaagatcctcttgtgctgccagccgtttaaaggaatcatagtcagaaaaaagatcaatgccgcggctgatggatttgacgatcgtgtgttcttcagccggttttccgtcctttatcccccgcaaaaaaagcgtaaacaaaccgtcctgttcgtttaaacgttttattttctcagagcctctcggctgtacggcgacaacgcttccgttaaaatccgtcaattgattcaattgatcgatctgccagtcagcgaaggcccgcaaaaagttgccttcgccgaactgaaggactttttcaggatattgaatgtattttccgcacatctttttattcagctgccgcaagctgtccgcctccttatatttatgcacacgttaacattctcccgtacaaaaacccggataatcagacgggccgttatgtgagttttttaattgaatctcttatcatcacctcggtgttttcgtatattttttccgccgccgtatccgggtcggtgataagcgccaaaattttctctgcgccgagtatgctgattttttcaaccgggcgttttactgtcgaaagcctcggcgtcatgtattgggaaatgccgatgtcatcaaacccgataacggaaatatcttccggaacgttcaggcctttggcgaaaatggtattcatcgccccgatcgccatatcatcgtttgaacaaaaaacagccgtaggcggtgattgaagcgccaaaagtttttccatcgcctgactgccgctttccatatcatagcggccttttacactgtattcatgcttaatcgggatagaatgatcaattaaagatgtcaaatagccttctttccgctgagaagctgacctgaatccttcctttccctcaatgatcgcgatatctctgtgtccgtttgcgatcaggcagtcgaccgcctgtctggagccttctttatcgtttgacaggatattcgtgatgctccggtcatcaatgtcccggttcagcacgacgagcgggatgtttttctcgcggatatgataaataaatgaattatcactgtcgctttggctcattaaaatgattccgtcatatctcatgggcgtaatggtttcaaagcttttcagatcgtcaatcgcgcggacgaacaaattgtattcctcactgattgtgcggtttacacctttgatggtatcggaaaaaaagctgtgtgaggttccgtttgtgatgcttgtaaaaaacagtccgatcgtatgggacttttgcatggcaaggctttttgcatttacattcggtgtgtaattcagctgtgaagcgagctctaatattttctgttttgtatgctctttaatgtaggggctgccgttaagtgcccgggatacggttgtgtgggatacgttggcgagttttgcgatatcttttatggttaccatcgtttttcctttctttctgtatgctgtcatttatttctattgtaccattaacggacagtccataaaatcactaaagttgaggttttgcatgatgtaagtcctgaacgagctcgtcatgctgccggtccgtcagtttatacattaaaccgataatcagcatggcgcacgctaaagcgaaagccgggtacagcagcagaagccctttaatcccgattaacgtgccttttgtctgagacgcattcgggatatagccgataacgctcagcccgatgcctgaaagaaaacctgataaagattgggcgagttttctggagaagttgaaaagcgaatatgtcgtcgcctccttccgttcacccgtcttccactctccgtaatcaataatgtccgacacaagcgcccacgtaatgccgtttggtatactgatcccgataaaagcaatgctcgctaacgccgtaaagatatatacatttgacgggagacagaaattcagcgcatcagccgcggcgctgacggcaaaaccgatcatcaccgtttgcttttttccgaagcgtttgacgagtttcggcataaacaacacacctaaaaatgaagagccgatgatgataaaactcatgtaggacatcagctccgcattgttgagattgtattgggcgaagtaaacaagcatagcggatttaatgttgtatgccgatattgagaaaatcgtcatgaaaacgacagtcagaagcggtttgttgccgataaagcatttgaaaaccgacatgacggacagcttttctttcggcgcttcacggacgataattctttctttgcagtttcggtagcagatcataaatcccgcgattccgattacggccatcattcccatgactgccgggtagccgatgtgaacgttatcaaaatgaacgagaatcgggatgacgatgacacttgtaatgagcagcgcgccgagagagccgatctggcggaatgcggaaagcgccgttctgtcctccgcatcctgtgtaatggctgcaccgagggagccgtacggaatattgacgaaagaataagcgaccccccacagcatgtaagaagcataggcgtacacaagcttccaggtgacactcacgtccggtgacacaaaaatcaatacggtcatgaccgcaagaataatacttccgaataataagtacggcctgaatttcccccggggtccgatcttttttctgtagtcaatggccgagccgacaatcggatcagtcaaagccgcaaacagcttgctgaccaaaaaaatactgccggcgaacgctgccggaatgcctgcgacatctgtgaaaaacttcagcaaatagatctgcccgagatcaaacataaatccgttcccaaaatctccgaaaccataggatactttttctttcagactcagcttatgctccttcacttttgcggcaggtgctgtcacgacaggcacattactcataggccacctctttcattccattttttaaaagcggaaatattcctcagcattccggtaacaaattccctcgacaatcctccctaaaagctccatatcgcagggcgcttcgccttgttccgcccagccgccgatcagcgtgcagacaagccgcctgaagtattcatggcggggataggacaggaaacttcttgaatccgtcagcatcccgataaaccggctgaacaggcctgtgtttgataacgctttcatttgttgaagcattccatctttcgtgtcattgaaccaccaggctgtgccgaattgaattttccccggtgttttcccatcctgaaagctgttgatcatgctggcgataatatagttgtcattcggattcagagaatacaaaatcgttttaggcaattgccactttttttcggcggaatctaacagccgggcaagcggttttgcgatacattcatcattaatcgagtcatatcccgtatcaggaccgaggctgctgaacttatttgtattggtatttcttaacgcgttaatatggaactgcatcgcccagtccagttcggcgtaaagaccgcaaagatattgcagcgtccgtgttttgaatttcttttcatcttcaaaagacacatgctctccgcttaatccggcggcaaaaatccgggccgcttcctcttcggtcgtctcggcataaaccatttgatctaatgcgtgatccgacactcttcccccggcattgtgaaaaaagcggacgcgggattccaacgcatccaaatacgattggtaggtggtgacagccattccggaagcgctctccagcgaccggacccaatcggcaaaacccgggctgctgatgtccagacctttgtcaggccgaaatccgggcagcacttgaaccggaaaatcactttctttcaacatttcatggtatgtcagcgcatcggcaggatcatcggttgtgcaaatgactttgacatttgatttcagaatgagatcccttgcgccaaacccgtctccctgcaggagctcattcgtatttttccaaattgccgcggccgttttttcattcaatacgtcataaatgccgaaccagcgctgcagctctaaatgcgtccagctgtacagcggattgcctatcgccatcggcaccgtttttgcccaggcgaaaaacttctcttcatctgaagcgtttccggtaatgcagcgctcttcaatgccgttggccctcatgatccgccacttgtagtgatcaccgtaaagccatgcctccgtaatggttgtgaaggttttattttcatagatttcctttgggcttaagtgacagtgataatcaatgatcggcatgttttcagcgtattcccggtacagcattacggccgttttactatccagtaaaaagtcatcacccataaaagctttcacactctcatcctccctcttaaaaaatgttaacgttaacaaaatggttcttttttattttagcttcctctttctcacatatcaatcatttttattttatttttcagaaaattgtatctattaacatttttatgcaaaaaaaagacattgccgagaaaagtccggcaatgtcttctgtatgatcttaaggattagtaagcgaggctgaataatcctttgatatgtgttaaataacgtacgttacttgcttctttcattaaagatgccggaaggcctttcagcggagtagagttcgctccgatgatggcaaccgcgtctttacgtccgaggcttgcaagcgtaccagagtttacaggcttgaatgtttcaagcgtttttccttctaagtaagcgaacaggttgtaaccgacaagttcacccatctgccaagcgatttgcgctgtcggcgggtacggacggccgtccggcgcaaagtatacagcgctgtctccgacaacgaatacatcttcgtgagaagtagattgtaagaaatcgttaaccgtcgcacggccgcggttcacttcaaggccggattcgccgactaacgggttgccttgtacgccgcctgtccatacaaatgtgttggcaacgacttttgaaccgtctttcagatcaataacgtttccttcaacatttgtaacaggaagacctgttaagaactcaacgccgcgtttttcaagactttttgtcgcgcgttcgataaggtcatcaggaagaacaggaagaattttcggacctgcttctactaatttcagtttgatttctttcgggtctacgccgtattttttcgtaaggttcggcatgatgtcagcaagctcaccgacaagctcgacgcctgttaagccgccgccgccgataaggatcgttgcatcagcttcgtttttcgttttagagtattcacgcacacggtcttccacgtgtttgtatactttgttggcatcagcagcagatttcagcaccatgctgttttcttcgagtccaggaatgccgaaataagccgtaacagaaccaagtccgacaacaagcgcgtcataagtcagcttagaaccgtcagaaagggcaacttctttcttatcaactgagaaagaattgacttctgcgattttaatgtcaacgtcttttcctttcagaagtttttccagcggcatagcaacagcctgttcagacacgttgccggctgcaaggcggtgcagttccgtaatgatttggtgagtcgggtatttgttcacaacggttacgcgtgcttcatctttactgtaatgtttgcgaacggttaaagcagaaagaactccgccgtaaccagcgcctaaaatgacaatatgttttgacatcgtatatcctccgtcctttatatcaatttgaatctgagattatttttgtttttcgttcatgatttcaagatagctgttagcaaaacggaacagcttttgagcttgaggatctttcagcatgcgcagcaggccgaaaagtccgatcgtttcattgcttgcatccgcgcggtcttttgcttcgatggcagtagccgcaacttctttcgctgtttctttcaccggctcaagaatttctgtaagcgcacccactgtatcgctcttcaatacttcgtctgtcgctacagactgtgcaaaatcataagacttcgttaaaatatttactaactcagtcagttttggaagctgatccactaaaacagtcagtgattcttgaacttcaggttttagcagctgatcaataagatcgcgttggccttggctgacagatgcatttgtttgatcgattgtttctggcatatccgattctcctttactataagcagtatgctgattttttttggaaagggtagcctttcccccttcatgcagaaaagcatgaaaaagcaagattgtgaattcatgcacaatcatttacaaaaataaatgtttactacccagtttttcactttgccatatccagtattatttttatatcaacaaaaacaattgaataagtcaaaatttctttttcctctctgaaaatagcaaacataaaaaaccccaatttgatttactcttatataataacactttttgaacaaaatttgaacgtgaattgtttcgtttatgaaattatttatatggcgggggtgtaataacgtttcttttaggctatttttttacagaccgtccgcttttcccctgtcatttttcccacaattctaaaagcgggcccgattttcccgtaaaggggtcacattccgggagcgggacacggctgatttcttctgaagttctatcatttttctccgtttttgtatcgtactgccggccgcccggataagccccgatcacggtaaaatcagaactgcccgacagttttttatgtccggtgcctgccggaatgaccgctgcgtctcccgtttgaagaacggcgtccgccccttgttccccgccgaacctcaaaaccgcggttccttttaccgcgacaagaacttcgtgcgtggtgctgtgaaaatgatgatacggaaatactccgcccgtccagctgttagaccaatcgtgccggcggaggacggactctgctttctgtaccgtttcttcattaaataccgctttataaataacaagcggaagattcgggttattcggaatgcggccgtcaccttcgaaataaagcacttgaatatcctctttctgcattgtgttcacctccgtatatgtctgtttcccattcatcatttattaaaacgctattttctcatattccattgcgaagcctgccggtgaatagtatagtataaaaaaatatgtgtcaaaatgagggatttaatgaaagccatcgtgatcggaatattggcatctctgttttttgcagtcacatttattttaaacagggcgatggagctttccggcggaagctggatgtggagctcttccctgcgttttctttttatgattccgtttttatttttgatcgtttatgcgaaaggaaaatgggcgccgctctggcatgaaatccggaaaaaaccgtttttttggctgaagtggagttttaccgggttcgtgcttttttatgccccgattacgtttgcggcggcatatgggcctggctggctgatcgccggcacgtggcagattacaattgtcgcgggtgtgcttctgtcgccgtttttctgcgaaacaaaaaattcaccggcgggcccggtttccgtcagacaaaagatcccgctgatttcgctggttacttccgtcatcatcctgatcggagccgggctgattcagcttcagcatgcgggttctctgtccggccgcacgatactattcagcgtggcgccggtcgtcgtcgcggcgtttgcctatccgctcggcaaccgcaaaatgctggaacaatacggcggaaaactcgatacgtttcagcgggtgctcggcatgacgctcgcaagccttccgttttggcttttgatcgccgctttcggctggtatagagacgggcttccctcaatgggacagacattccaatcctttatcgtcgcactcagctcgggcgttatcgcaacagtattatttttccgcgccaccgatatggtgaggaatgagccgcagaagctcgctgctgttgaagcgacgcagtccggagaggttctttttgcactgatcggcgaaatcgtctttttatccgcggcgtttccgtcacttctttcatttgccggactgttcattattattgcgggaatggtcatgcatacattcgcttcccggcagacagaccagaaaacggcggagcaaacgtcagccaatctcaccggttcctgattttttacgaaaggtgtcatcctatatgaaagaagaaattccggcaatatcttttctgtcagccggcaaacgctttgaacaaaacaatacgtcctttgatgtcctaagccgtgtaaccggacatatccaaaaaggttctatcacggcgttgatagggccttccggcgcgggaaaaagcacattgctgtcactttgcaatctgatgaatacacctgatgaaggggaagtgcttgtattcggaaaagaaataaggcgctgggatatcagggagctcagaaaaaccgcgggccttgcatttcaatcagctcccgtcacggagggcacggtgcgggacaaccttctgctcgcagaaaaactccacggggcgcagcactatacccctgaagagctcgcagattttacagaccttccgcgcgggcttctggatcggaatgcgaaagaattatccggaggtcagcggcagaaactctcattagcgcgaactctcgccggactgccgtccatcctactgctggatgaaatcacctcggcgctcgactcctcatccgttctcaccattgagaaactgattacgaaactccatcggcaaaaacagctgacaatcctgtggatcacccataaccttgaacaagcagaacgattatccgatacggtatggtttatggctgagggacggcttttagagaccgcggaaacgaaaacgttctttaaggaaccgaaacacgaaaaagcccgggcgcttttacaagggagcgggtgctgatatgaatgatctttcactgttactaacaagtatatttgtcattatcgctttattcctgtctaaatcttttaaagccggtgtcgaaaaggatatgatcgtcgcaaccgtcagggccgtcattcagcttctcatcatcggctatgtgctgtcgctgatttttcgcggtgatcacccgatatttatcatattaatggtgcttctcatgctcacggccgcttcgcacaatgtcgccaaacggaaaaaaatgcggatcggctcattttggcgcgtttttctgacactggcaatcgcggaaaccgtgacgcagggacttttactgacccttcacatcattccgttcacttcaagatatgtcattccgataagcggcatggtcatcggaaactccatggtgctctcaagtctgtttttaagccggctcagttcggaagcagacctgcggaaagaagaaatccagctgattctctctctcggaggaacgcctaagcaggccgtccggcagatattgacgtccagtatgaaactcagtatgatcccgacgctagaaagccagaaaacattgggtctcgttcagcttcccggcatgatgacggggcagattttagcgggggctgatccgatacaggcggtgcgctttcagctgctgatcgtttttacaacgatggcctccgctcttcttacatgcatcatactcagcgccttgacatatccttcccttttcacggaacactggcaattaaaaaaattcagcagggaagcgtaagcttttttccctgctgaatggtggtttatgacaaggtcagagattcatagtaacgggataattcaattatcatcgctcccatccgctcaatgtccggagcaaggaccctctttaccccttcatcccggatcgcttcagccgtcactttgccgactgcggcggcaagcacatgtttttcgaatgcctgctgcaattcttttgcggatcctttttcttttgcataatcaaagagagagcgcacttgaatggctgtcgtaaaacatacggcatcgacctctccgtttaacagctctcccatcagtttatcgaccgtctccctttcaggcggaatatgctgatacggcagaacagggaatacctccgctccgtttttctcaaggaactccgttaaaaccggcgctttttcgccatgaagctgtatcataacttttttatctttaaagtcaaatcgttccaaggagcggatcagccctcttgttgtaccgtcttcatctgaggcatgcggcgtgatgccgagcttttttaaggccgcatatgttttatagcctctgcagccgattttcgcttcatgaatggccgctaaaaattcttctttcagaccgattttttccgataccgacaataacgtttccgtaccgatgcctgtggtgaatatcacccagtcggctttttgctcggcaaatgttcttacgtcgggttccatttgatcctccgccaggtatacggttccttggagggaacggatgaccgccgttccgccctgcttttctattaattttgtgatctcttctgttttccgcgaaccgccgatggcaatccgtttcccgttcaatccttttcccatcgctgttttcttcttcccttcagatgccgggcgccctatggcaggccgtcatttatttctattattgttacgcaatcagacgggaaaatcaagctatgctcccgttgaatcccccgtgcagttgctgtatcattaaccggacagaacgatttgattcgcggagggactttcaatcatggaaacaaaaaaagagttcgagacaaaaggatacgatacttcggtcatttatgagttcaatgaatatcctgatgttcacagcggccgatgtgacaattgcgactacacgctgtttaaaagctcagtgaagggcggaaaatttttgagggaatgccggagatgcggcatgaagaaaaacatataacaaaacaggcagccgtccggtgctgcctgttttcctaatcaattttcgacggacgccgttttcaaaaattcttcaatggcgcaaacagcctgttttggaccgccggtttcttttattttctgctgcatgcttttcacgcggctgagaatgtttttatcgccgtatacgttctgaacgtctttttgcagacgggccacagtgacttctttcagcggcagatgcacgccaagccccaattcatccacacgctttgcggtgacctcttgttcgtgcatttgcggaacgacaacgagcggaacacccgcattcatcgcctccattgtactgttcatcccgccgtgagatacgaacagctttgctttctccagcacatcaagctgcggaacgtgctggcggatgataaagtgatcgggcacatccgaaaaactttccggatcaattgttgtgccgactgacataataacccgccagcccgagtcccgaaacgcgtcaatacacatccggtaaaattcaggccaggcgttaaacgccgttcccagtgagatgagcataagcggacggtcatcggctgcatcaatttccagacttcccgtatttgtgcgttccccaagagacggacccgcaaaacagaatcgttcatcaaaggtttcctgtttcggctgaaaggcccttggcataaagacgatattcaatttttcaggcatgaaaaattcttccattgtcatccgtttcacttgttcattttcaattttctcctgatattcttctatcgcctgtttggccgcttccatcgtttcttcgtctcttcctaattgaaaatactcattcattgcataactcgggcagaactttacggccgggatgccgccattatccgcaaacaattttccggcaagcgctaaaaaatcaaacaggacgatgtcaggaaggtcgtctttgtacagctcttccagctgcggaagcacttcaaccgcttcttccagaaacatcacaaacgcgtcacttttgtttacccgttcttttatcgtcttcgggtccgcctttatgcttgtgcggtataaaacgggaatggcacccgttttggcaacggaagcttcaaattcctcagtcgtagcgaatgtcactttatatccgcgattgacaagttcctcggctacaggaagcgtgggattgacatgaccgtgagcggccacattaataatggcgatgtgtgtttttctcatcttttttcttctccctcattttcgtttatctcggcttctaaagactccagcccgtacatgacactgtttcggatcggctcaatccgaacgggctcaaggtgtgaaaaggcttttacaattcctttcagtgcggcttccgcttcaagtctggcaagcggagcgcctaagcagaagtgtacgccgaatccgaaggaaaggtgcggattcgattggcgatggatatcaaatacgcccgccttctcaaatttgttttcatcacggttggcagatgcaacgtagcagagaacgatctctccgcttttcaagcggcgcccgcgcagttcagtgtcgtgccggaccgtccttctgacaaacggagcgggagcgcgaaaacgcagcgtttcttccactgtttgcgcgatgagagaagggtcctgtctcagctcttcataaaggccgggcgtctctaatatgctgtaaaccgcatttgaaatgagattagtcgttgtttcatttcccgccactaaaagcaggttgcaaaacgggatcagatcttctggcgtgagcttctctccctcttcttcctcttttatcaaaatagaaataatatcttggccgggctgttttcgtttgctttctattattcccgcaaaaaacgccgccagctccgcctcacattggtcacgttcctgctgatttttctccgccgcttcaggactcgcatctttcggcatgctgacgagaatgtccgaccattttttaaactgatccatacgctcggacggaacgcctaataattctgaaatcaccatgaccggcaaagggtaagagagatctttaacgatatcaatccgccctttgttctttgcctgtttcaggagatgatcggtaatgtctttaattctcggctcccattccttcaagacacggggagtgaaagcgcgattgacggcagatctgatttgggtatgtttcggcgggtccatattcagcatggactttgcaatcgagcttttcacatcagtcatgcggcttgagaacgtctctttatcactgatgacttttttgacatcatcgtataaaaacacactccaaaccttcgtttcttcatcaaagtatatagggctttcacgtctcattttttcataccaaggaaaagggttgtatacgtccaggccgttttttcctttcatcagggttctttggatggcttgtctcgtgctcctcagcttactcatgttacatcactcctgattgtttcatatttgaatagttgacgtaccttgaattttatcctagcacatattttcaatttttttctattcataaccttaactattaacataacacaacaaaagtcatgaatccggaggtgaaatttctcccaagaaaacagcagaagcgcacaaaaaacccgagccttcagccaggctcgggagaaatgttcactcattcgtctgcggtttctggtgctgcttttggtcttcaggaggctgcgtatttctttccatatcgtccgtatcagcgcccatgcctttcaggaaagaaaacagcagagtgacggccttgttgatttccgggtcttttaaagcgcggacgatatcaaaataacccgtcttcctgccgctgtctttttcttcgacggcctttgtgacgcccgcattgattttaacgataaacggctcaagctgttttacatcgagcatgccgagaacgccgcttaacagcaggagatttttcagcatattggccgtttccggcgtattcgccttcttcaccaggatatccatcactttgtctccttggccgaagagcccgcgcagaagcgccaaaacgccgcgctcgttcatgtgctgaagaatgtgcagagattccaaaatcgcgtctttatttcgtaaaagagccgtctcgatctcttctaagtccttttttcgtttgtcttcttctgtgacggtctgttttcggatgccgctgattgctttagccattctgctgtttccccctttttacggcgtctcccggaaatacataatcttgacgcgcccatttccgatcaacccggacaccgatctgcggctgcgggtttccgtaacggaaattgattttcggaagcggattaacgccttcttttttcaaaatctccatcttcgctgatgtttctttatatgccggtgtatcggtatccttatccgcatagctgcttgtcaaaaggttaatggcggcgtcttttgaatcgttcatcgggagatagacttgtttgccttttaccctgtctgtgatgacgcatttgactttcacatttccgtacggtgatgtcagacggacaagcgttccgtcttccagccctctttcttcggcgagttcgggcgagacctcaaggaacacactcggtgttttttcggatattccttttgatcggtaagtcagattcccttcgtgaaaatgctcgagcagccgcccgttattcacatggatatcatattcttcatcaaattctttcggctcggtccactgaacgggatatagaatcgctttgccgtctgaaaacggaaacttgtccgtaaataaaagcggtgaatcggttccgtccgctgctaccggccattgcagtgaattgtagccttcgagacgttcgtaagtgacgcctacgtagagcggcgaaagcattgccgcttcttccataatgtctgccggatgttcatagcgccaatcagcgcccagccggttggcgatgtccgtaatgatctgccaatcaggctttgaatcgcccagcggttcaaacacttcgtaaaggcgctgcaccctccgttccgtattcgtaaacgtcccttctttttcaagactcgggcttgccgggagcaccacatcggcgaactcggccgtccgcgagagaaaaatatcctgcacaacgaagaaatcaagcttttcaaaggcggcatgaacatggttgatattggagtcgacaagccccatttcttccccttttacatacatacacttcagttttcccgagtggatgccctcgatcatttcatgatttgtcattccgatttctttcggcaggtctgttccccagccctgttcatactttttgcgggctttttcatccgttactttttcatagccggggaagctgtcaggcatactgccgaaatcactggctccctgcacgttattatggccccgaagcggatatgagcctgcgccgggcttgccgtaatttccggtcacaagaagcatgttggaaatggccgtgctcgtatcacttcctccgatatgctgggtgacccccatcgcccacagtgcgcatacgcttttggcttcatgaatcatccgggccactttaattaaggtatccttgtccacaccggtatgtttttccgcatattccatcgtataaggttcaaggcttttcacgaattcatctaatccgttcactctctccttcagaaatgcagtatccgccaaatcgtgatcaagcagatatttcgatacggcattcagccagacaatatctgatccggcacgcggctggaaaaacacgtcggagcgctcggccatttcatgttttcgcaagtcagcaacgacgagcttctgtccgtgcagcttatgagaacgtttaatgcgtgtggacaggacggggtgagactcagatgtatttgaaccgataatcagcacgagctcagctttttctatatctgtaatcgaccctgaatcaccgccgtatccgaccgttctgaacaatccggccgtggcgggagactggcagtagcgtgagcagttgtcgacattatttgttccgataacggctcttgcaagcttctgcatcacgtatgattcttcattcgtgcatttggaagatgtgataaacgcaagcgcgtccgggccgaaatgttcttttatatcggtaaatttatcagcgatcagctgcagcgcttcatcccattccgcctcccgaaacgagtctccttcccggataagcggtttggtaaggcgcttttcactattgacgaaatcccagccgaatttccctttcacacacgtcgaaattccatttgcgggcgcctcagcctgaggctcgacctttaaaatgtctcttcctttcgtccatatatcaaaactgcagccgacaccgcagtatgtgcatacggttttcgtttttttgattctttcatcccgcatggccgattccatatccgatatggctaaaattgatccgtatccggtttcgacgccttttgtgatatcaatcatcggccgaagcgtctcttggttaatgcctgttaaatacccagcttcgccttccatgcctttttccatcatggcattgcacggacataccgtcgaacaatgtccgcaggaaacacatgatgattcattgatcggcacatcctgatcccaaatgacccgcgggcgtttccgctcccaatcaatgcttaaggtttcggttacctgtacgtcctgacaggcttcgacgcagcgtccgcacaaaatgcactgatcgggatcatatcggtaaaacggatttgattcatctttaggatacggtttttgatcgaacggaatgctttgatgattgattttcatttcctttacggtattatgtatttcgcagctcccattgttgtaatcacagaccgtacagtacaattcatggttgtgcaaaatgttgtccatgccgataacctgcgctttttttacatcggacgaaagcgtatcaatgacatctccgtcctttatttgcgcggaacacgaacgcaccagttccccgttaacattgacgatacaggtatcgcacgtttcaatcggcccgagactcgggtgataacacacgtgcggcacgtcaattgaactattgttcaaaagctgcaaaacggtttggccgtccggcgcttccatttcaaccccattgattgtaactttctttgtatcagccattttctttcccctttctgtacccctctatacatcctctatgattcccaaccggcctttcactaaaacatctcgtttatctcaggaaacatacgggtatgagcggtaaaaaggaggcgttcacatgttgaagaaaaaaacactcgtcacgggattatcggcagtgatgctcacgggatgcgctttcggagcagaagcattttcggatacacagcccgtccatgccgcagccgcttcaaaaacggaaaaccagcgtgcacaagaactggtgaacagcctttaccaatcggcatttaaaggggaaatgccgcaaaatgtgaaaggcctgaaaatcaaccaaagcacaagacaggacgtttacaataaaatcggcgagccggaacaaaaagcagacagccgcaatccatttgatttatacagctggaacatgggaaaccccgggtatggattttcctatcataaaaacggaaaaatctcggaaatacgctattttggaacgggggtcgagcggcgcttaaacctcggcagcgtcacacctgacgtcttaagcaaacaaatcggcagcgctgacaaaatcctgacagtgccagaaacgggcgaaacagattacgtctaccatacggggcagtatgagctccgcttcgtcatcggcagtgatcaaaaagcagatcatgtcaacctaaaagccagataacgcaaaaaagcggcctcccgggccgtttttttcatagacagcttctccgtcgttccttacaatacatgggagtacaaaaaaaggggaacagtgtgaagtgaatagacatccattgacatacggaatatgtaccgtttttatcatcgccctcggtttgctgtccagaaccgcatacatcaccgccctattgcccggcatcataaacgcttatttaggagatgccttgtgggcggccatgatttttacaggattcgggcttttcttacggcacatccggacggaaacagccgcaattttgagcctctcgttttgctgtctgattgaatgcagccagctgtatcacgcgccatggattgacgcgatcagaagcagcacgctcggcgggctgatcctcggctggcaatttgtctggagtgacattttcgcctataccctcggggtatgcgctgccgcacttttagaatgggccgtaaaaagaaaccgccagccctcttcataatcggagcacgccgccgatatgaagggataaggaggtggaagctatggatatccctgcgttatcaatcgcaatgcatcagtcatctctggcgcagaatgtaaatatcgctttaacaaaaacggtcatgcagcatgcacaggctgcggcggaagaaacagtgaaaatgctgccgtcccagcacccgactgccggccattcaattgatgtgaaagtgtaaaaaaagatgccggatgataaccggcgtcttttttttgcccattgtacatacaccgtaccgggcatacaggaataaggtaaacggaaccaacatttgaaaaggaggttttcctcttgtacgatcctttcgatcatgaatacacagccgagagccacgaacgggtgccatatcattatccgcggccgccttattattaccccagaccatatccatactatccgcggccgccttattattaccccagaccatacccatactatccgcggccgtatatcccgttctatccttggtattaatgtttgaaaagaaatgactgcagacaggaggcttcccctgtctgctattcaactttgaccgacaggatatacgggagggcttgaactttctccattaccgctgctttcccgcttttgcttttcacccttcccttcacttcaagcaccgccttattcaattcataggacgtaatcagaattcctttttcctcaagagaagttaaaatatcatgcatgacggctttctcttcaatcctgaaactgacagacaaagaatgcgccgccggtttaaacagaaaatttaacagttcaagcccgattaacgccaaaatcgtgccgctgatgccgatgacatacatacctgccccgatcgtcagcccgatccccgacgtagcccaaatccccgcggccgtcgtaagcccccgcacgacatgccgctgcaaaataatcgtgccggctcctaaaaatccgacgccgctgacgacctgcgccgccacccggctcggatcaaaggacgtatggctgttggataacaaatcaaaaaagccgtatttggaaacgatcatcatcaaggcgctgccgacggccactaaaaaatgcgtcctcaaaccggcttcctttgccctgaattctctctccaatccaataagagccccaagcagacccgcaaccgccagacgaatcacaaaatcaagttccatccgtctctctcctttccttatcttcttacccgcttttataacccaatcatgcggtgtatctttttttaaaatgcaccgactaattgacataaggaggttttatgaaatatattctgtggttttttatattattgttatttagcttatttattttgggaggatataaagcagctgtttctcaccctgatttcccggtgccattattcgctatgcacactaaaacaaaggaatatgaaaaaggaaaatacgtttcaaactatacataccgtttcgcaaaagaagaagaaggtccgagcggtttataccaattggaaatagccgaaaaaggctggaaacttaaagggcaggaaggacttatcaaaacctatgaaaagcgaggagaacgtgtttcactttttttcggtacgggggaaataagcgtcattgaagaatgatccttctcaaaagacaggctgaaatccgcaaacggcatatcttttacgactcccttatctctgcgaatctataaattcagccaatatttcaattaaggcgaacacctttctgatgcaaaaaatgccgccttcaatgagaaaatcattatacaaaaacaaaagcgcaactgaaaaagaataagcacctcataaaaaaagccctctttttaaaaaagagggctgcagaaggaaaacaggtaattatttatctaaagtgtactcactcacattaaaagtaagaatgtttccaaaaacaatatggtcccttctattttgaaaaggccctatattattatagtgcttctcgataacatatctagataagcctattccagaacttttttgatcataccatctgataaaatctttaatctcttccattgaaagatcaaattctttctcaagacctgtggtcattgtaacaagaagaattgcccgattactggcgggctgtttatttggtggttcctcaggattctttggttctccatctttatcctcttcggtttttaccggagtaagagcatgcagatattctaatgcatatccagacggcgttagaccgccaaaaagataaagattgtctccaactgcggctattctggcatcatatctttcaaaaggatagggtttttctacgctaatttcatctttaattggatcatatacttttgttaaaggctcaatcacacttggattttttctaccgccaataatgtaaatcttattattaaggacagctgtcgaagtattttgcaaaggtcctaaaaattttttgcgattccatctatccataacaggatcatattcgtaaatatattcgtttagatcgcttctgatatgtccttgaactacttctttagtttgcccgccaactaaataaatctttccgttaaaaacttcagtttctgttgcatatatattaattgggggcgcttttttaacactccaagttttggataaagtatcaaaagcataatgttgcgaatgagcagcatcggtgtcgaatcccccaatcaaataaattgtatcgttaataacagcggctgatgcatggcaagtcggggtcggaatatcaggtacacgtccccatgtatttgttttagtatcataaacatctacagagctgtaaacatttgctcccttataaccgcccaatacataaatataattacctatcactgctgtgcatgaacctaccctgggtgtgggtatatctaatccttgcgtccatttttgacttatggtgtcaaaactataatttttgttatatttttgattacgtgcacctcccaatacataaatagagttacccacaactgctgattcaaaagcataattaggttcaatcatatcaagtaatcttgtccacttgtcatatttctctgtcaatttattcattcctctcatctttgtgataattccatttatagatggcgatcgtatgacaagagattcatttaactaagcgatccaagatcacttactttcgatcaaagaaatattgaaaaaggcctctggatttaaaagtgatttggttttcacttctcggttattggccaacagtttactaaaaatttagtatataagtgtaatatagaataacacctctcaatgaatccttaatgaagctcataatagcttcaaccaaaggcatttcacattaaagtaaagatcactctcaatccaactgcatctctcaaacagaatgtccggcaatcacctcaaaaaacgaggtgaaatctgtcagtatcccgtcacccgccagctgtttttcttcaaatagcgcgcggttttttccgtgcgggtcaatggccataatcttgcccgcacctgcttttttcgccgctgtgagccccgaaaaggcatcttcaatgaccaagcattcttcaggtctgaggcctaacttttccgatgcgatgagaaaaatatccggcgccggttttccggggaagctcccgtcatcaaacgtgactttgtcaaaatcaaaccactgatccaaatgaaagacgtcaaagtaaaactcgacattttcctttaccgtagccgtagcgatggtcatcggcgtttcagattttttcagatgattcaatacgccggtcagtcccttcgtcagctttaattcgtctttgttttcaaggcataattctctgtagtaagcttctttttcaaaagacagcttcctgatttcttcatttgttaaatcgccggaaataaaatacgtcaggatttcactgtttgttctcccgtgaatgttaacgaaaatgtcttcatcagaaatggttttcggcgcgtattttttcaccatgaaaaaccatgctttttcgtgcagatgcgaatcttgaaacatcgtgccgttgaaatcaaaaataacccctttcatcgaaccgcccgccttttttatttttttgcgattttgacatctacatattgctcgtaatgaatttgaacatctttcatgactttatcatccgtaatcagatagtccatatcgtgcaagttatagaacacgtaaaaatcttcccggttaaattttttattatccgccagcaaaaatttcgtccgcgaattattcagcgcgatttggtgagcttccccttcttcaatgctgtaagaagaaatctcatcattatgtatgccgttggcgctgatgaaagccttcgtaaaattgaatttctgcagattgccgttcacgatggggccgacgaaggcaccggtattttttcggaagtcgccgccaatcaggatggtatccgcagtgtcgccatgtttcaaaatatcaaatacgggatagttgtttgtgataatcctgattcgcttatgcagcaggtgtttcgctaaaagttcaatcgtcgtgccgggccctaaaaaaacggtatcgccgtcatttacataggaagctgcgagttccgcgatcttccccttctcctccatttgaacaccgagtttttcattatgcgataattcgtgatcaatggaataagatatgctctgtgcgcctccgtgaatacgtacgatttttccggccttatccagctcgtccagatctcttctcactgtcatatcagaaacttccagttcatcgataatatcactcaccgtaataaacccccgcgagtttacgatatcgatgatttttaaaagtcgctctttttttaacatgttcaatcatcccctcaactttacacacaatctaacatactgcggcaatccggtcaacaaaaataaacattaacaaacaacataatcaacatgtaaaacaacgaaaaacttatataacctctataaacacagatgttatttctttatgaagctattgacaacaaaaatatatgcgtttactattaaacaaaagacaacaattacaaacattaacaaactccaattcacacattggcgaaggaggattcagtaatgctcaaattacctcatgactttattttcggcggggcgactgcggcatatcaagcggaaggcgccacaaaagaaggcggcaaaggccctgtggcctgggatgaatttcttgaaaaacagggaagattcagccctgatccggcaagtgatttttaccgccagtttccggaagatattaaactatgtgaaaaattcggaataaacggcatccgcctttctatagcctggacgagaattttccctgacggcacgggcaaaatcaatcaggaaggtgttgattactatcatcgtattttctcagagtgccataaacgcaacgtcaccccttttgtcacgctgcatcatttcgatacaccgaaaggattatttgatcagggagatttcctcaaccgcgctgcaatagaagcgttcgtcagctatgcggagttttgctttaaagaattcagcgaaatcagatattggagcacgtttaacgaaatttatcccacagccaccaaccagtatttactcggggttttcccgccatctgttaaaagtgatatcacaaaagtcattcaatgcctccatcacatgatggtagcgcatgcgatgaccgtcaacctttttaaagacggcggttatccgggagaaatcggggtcgtccactcattggaaacaaaatatcccgccagcggcacagaagaagaccgccacgcctgttttctggatgacgcgttatcagtgagattcctcctcgatgccacctaccttggctattattctgaggaaaccatgcgtgctctggatgaaatctgtgaggcaaacggcgcttcatacgagttttcagacagtgactttgacgtgatgaaaaaagcctcaacgcgcaatgattatctcggcatcaatcattatcaatgccatttcgtcaaagcgtacgacggagaaaccgttattcaccataacggaacgggcgataagggcacttcggtctataaagtaaaaggaatcggcgaacgaatttacaaagaaggcctgaagcggaccgattgggactggctcatttaccctgaaggcatgtatgacatgctgatgcgcatcaaacgggactatccgcaatataacaaaatttacattaccgaaaacggcatgggctataaagatgagtttgaagacggcatcattatggataaggcaagaatcgactatttaaaagtatatttagaagccgtcagtaaagcgattaccgacggagtcaatgtaaaggggtacttcttatggtccttaatggatttattttcatggaccaacggctacaacaaacgttacggtcttttttacgtcgacttcgacacccaaaaacggtatccgaaagaatcggcctactggtacaaacttgtaagtgaaacaaaaacaatcatttaacgatcatacatgatgaaaagaatctctttccatcatgtgtgccgtctttaggaggtttttttcatgacaaaggaagaattgcagatgctcggttttgaaatcgtcgcctatgccggcgacgccaggagcactttattgaaagtcctgaaagaagtccgtgccggaaacttcgaaaacacggaagcagcattgaaaagcgccgatgaaaatttaaccctcgcccacaatgcgcaaacgaaaatgttagctgaagaagctgacggcaaggacatggaattagggtttattttcgttcacggccaggaccacttgatgacaacccttttgctccgtgatcttattcaggattttatagaactctaccgaagccgccgataaggagtggaaaaatgaacggtatcatcaagcaaatcgaaaagggaaaaccgtttttcgaaaaaatctcaagaaacatttatttaggcgcgatccgcgacggcttcttaactgccatgcctgttattttattcgccagcattttcatcctcaccgccgctgtgccggaagtgttgggtttcacttggcctaaaagtgtttctgaatggctttggaaagtttataactattcaatgggcgccctcggtctgatcgttgcggcaacaagtgcgaaatgcctgagtgaatcaatgaaccgaaaaatgccgaaaaacaaagggatcaaccccgtttcagcgatgcttgcttcagtcgtcgggtttctcattttaagcgtcactcaaatcgacggcgggttctccgcggaatatctcggcacaaaaggtcttttagccgcttttgtatccgctttcataacggtgaacgtttacagattctgcgtgctgaaaaatattacgattaaaatgcctaaagaagtaccgggtaccatttcacaaacatttaaagatgtttttccgttcgctttttccgttttggccatggtgatcgttgatttattgatcaggaatacgctgaatgtatcgtttgcggaggctctctcctctctcttatcgccattttttaccgccgcagacggttatctcgggatttgtgtcatttggggaatgatggcgctgttctggtttgtcggcgttcacgggccttctattgtagagccggccatcgcagctattatttacgcaaatgtggaggcgaaccttcagcttcataatgccggcgagcaggcgtccaacgtgctgaccgtcggactcgggaacttcgtcggcacaatgggaggaaccggcgcaacccttgttgttccgtttatctttctgcttttcgcgaaatccaagcaattgaaagcagtcggaaaagcatccgcggttccggtgtctttcgcagtaaacgaacctcttctctttgctgcgccgatcattttaaatccttattttttcattccgtttgttgtaacgccgatggtgaatgtctgtctgtttaaatttttcgtggatgtcatcggaatgaacagttttatgtatgttcttccgtgggccaccccggcgcccgccggcttgattctcggaaccggcatggggctctcggcttttgttctgacggctgtattaattattgtcgatttcctgatatacctgccattctgtaaagcttatgacaaagtattagcggcggaagaagcccaacataccgaacctgaaaccgcgccgcaaaaatcccgggagatacagcccgtaatggccggcgcctcagaagacgcggccaccgtcatcagcacaaatcttcaggaatcctcatccgccttggaacacggcaccaatgtgttagtgctgtgcgccggagcgggaacgagcgctatgcttgcgaacgcactgaccgaaggagccgaagaatacaacgtgccgatcaccgcctcagcaggcgcctacggatcccattacgacatcatgaaagacttcgatatgatcattttggctccgcaagtcggctcttattatgatgacattaaagaagatgcggaccgcctgcatgtgaaactcgtcgcaacgaaaggagcggaatatatcagcctcaccagaaattcacaaaaagccattcagttcatactggagcatacctcaaaatagaatcggaggtttaccatggatgccaaacttttgaaatcaagattcgaagacattttcaagagaagtaacggagaactgtttttcgcacccggccggatcaacctgatcggggaacatacggattatataggcggtcacgttcttccatgcgcgatcacgatcggaacatatgccgtatgcgcaaaacgcgaagatcaccagatccggttatactcagaaaactttcctgacagcggcattgtctgccttgatctttccgccactgcatacaaaaaagaagacggctgggccaattatccgaaggggatggtccattaccttcttgaagccggcggccaaatagacagcggaatggatattctttttcacggtacgattccaaacggagccggtttaagctcctctgcttccattgaaatgttaaccggttccattttaagaaagttattcagcctggatgtttccgatactgaactggcgcttatcggaaaaagagtcgaaaatgaatttatcggcgtgaattcagggattatggatcaattcgcagtgcaaaaaggcaaaaagaacatggccattctgttaaactgcgataagcttgagcacgaaatgattccggctgcttttaacggatataaaatcgtcattatgaatacgaacaagcgccgggagctggcggcttcaaagtataatgaacgccgcagcgaatgcgacgcggctctcacggaactgcggcaatatcaaaatatcgcatcacttgcggaattgacgggagaagaattcaacgaactcgaacctcttctctcccgtgaaactttgcgtaaaagagcccggcacgcggtcaatgaaaacgagcggaccctctcagcggcggaagctctcaaatcgaatgatttgaaaacgttcggggagctgatgaatgcgtcgcaccgttcgttacgtgatgactacgaagtgaccggtgacgaattagacgcgctggctgaagcagcctggaaagaaggagcactcggagcgcggatgacgggcgcggggttcggcggctgcgccatagccattgtggaaagtgaagaaaccgccggctttatccgggccgtttcatctcactaccgcagcaggacaggtcttgaagcttctttctacatcgcggatataagcgatggcgcggctgaatggagggaaaaataaatcatggcgattctcgttctcggcggagccggctatatcggttctcatgcggttgatcaattagtaaacaaaggatttgaaacgatagctgtggataatctccagacaggccaccggaaagccgttcatgaaaaagccgttttttaccatggagatatccgtgacaaaccgtttcttcgctctgtatttgcgaaggagaacgtaacaggcgttctccattttgccgctcaatcccttgtcggcgaatcaatgaaagaccctctttcatatttcaataataatgtgtacggtacgcaaattacgctggaggtcatgcaggaattcgaagtgaaacacattgtgttttcttcatccgccgctgtttacggcgaacctgaaaaagcgcccatcacagaagacatgccggaaaagccggaaagcgcatacggcgaatcaaaactcatggcagaaaaaatgctgaagtggtgcgataccgcttgcggcataaaatatgtctcgcttcggtattttaacgttgccggcgcgaaaacggacggttccatcggagaagatcatcatccggaaacccaccttatccctatccttttacaaaccgcgctcggtcagcgcgaggaggttttgatattcggcactgactatgatacaaaagacggcacgtgcatccgcgattatgttcatgtttctgatttaatcgatgcccatattctcgctctggaatatttgcaaaacggcggagacagcggcattttcaatttaggatcaagcagcgggttttccgtatcagaaatggcggaagcggcccggcaagtgaccgaaagagacataaaagtaagagcgtccgcaagaagacccggtgatccaagcgccctcatcgcttccagcgataaagcgcggaacattctcggctggaatccgaaacaaacggacatatcggaaatcattgcgtcagcatggaattggcatcggcatcatcctaacggatacaaggacaaatgaaatggaggcggcggtcattgacgtttttgaatcagtggcagggtttctgaaagaaagcactgtcttaggcgacataaatgaaacagatgtgatttatacaagaaacagacttctcgatctgctcggactgacggattatgcagaaccgaaacgtatcaagaaacaaaacaggcttcactatttggacgaaatggtgaaagacgcggtaaaacggtcaatcataaacgatacgccggctgaaagagacatgctgggaagcagaatcatggacgtaatcacaccggccccttctctgatcaatgacgcattcagcgaattgttatcagattgcccgaaaaaagcaacagattatttttatagattgagtcaaaacaacgactatattaagacgcgggccattcgaaaaaatatcgtgtaccgctcaataacaccttttggggaattggacatcaccattaatctatcaaaaccggaaaaagaccctaaagacatcgccgcggtaaaaaacagtccggaaaaccggtatccgaaatgtctgctctgtatggaaaacgaggggtatgccggaacaccgcatcaccccgcccgttcaaaccaccgcatcatcaggcttgacttagcgggagaacagtggggttttcaatactctccttatgcgtattacagcgagcatgccatctttctttcaagcgtgcacaagccgatgaacatcagccgcgaaagcttcagaaggcttctggccattacggaaattttccctcattatttcgcgggatcaaacgcagacttgccgatcgtaggaggttccattctttcacacgatcattatcaaggcggcgcccatgagtttcccatggcaaaagcgggttccctctacccttttcatatgcgtcattttccagacgttcaggccgaagccgtgaagtggccggtatcagtgatccgccttcgcgcaaaagatccggatttgctgacagatgccgctgcgtatgtttttgaaaagtggcgggaatattcagacgaaaccgtcagcatcatcgcgaagacaaatgaaccccataataccgtcaccccgattgccagacgcaggggaacggattttgaaatcgatctcgctctcagaaacaaccgcacctccgaagattatccggatggcatttttcacccgcatcaagacgttcatcacatcaaaaaagaaaatatcggtctgattgaagtgatggggctcgccgttttacctccccgtctgaaagatgagctggcagaagtgaaaaagtatttactgaatgaacatcatgacatcaaggacattcatcttccgtgggctgaaaacatcaaagcggataaagacgtgacaccggaaaatgcagccgctgttttacaaagagaaaccgcgaatgtatttttacgcgcgctgaccgatgcaggcgtttttaaaatgacacccgaaggaattcaggcgtttcagcgtttcacgacgttattggagaatgacagctgaaacattcagagtgaaatcaatcaacaatcttttttatcaggaggtattgtgatgttcaaaaaccgattgaaacgtgtatttgtaaacgcaatctgtctttctctcattttcaccgcttttacatttcttgagaagtctcctaaagcaaaagcggatgccccgtttgcctatggcgctgatataggatggctgaaacaaatggaggatgaaggtgtgcgctggctggatgacggcgggaaacagaaagatgccttgcagattcttaaagatcacggaataaatgccgtgagactgagagtgtttgtgaatccgccaagcagctattattggctgaaagacggcacaacatggacgatgctcggctatagtgacaaagcgggcgtacttgcggcggccaaaagggcaaaagcgttaggaatgaaagtaatggttgacttccattacagtgatgtgttcgctgatcccggccaccagatcaagccgaaccaatggaccggctattcaaacagccagctgcaggcagccgtgtataaccatacgtacgatgtcatgaaagaacttaaaaatcacggcatctctcctgattgggtgcaagtaggaaatgaaatgaattcaggaattttactgcccgacggcagcacgagcgatttcagcaaattgaccggcttactgaacaaaggctatgacgccgtgaaatccgtcagcccggccaccaaggtaatcagccatttagcacacggcacggacaacagcctattcagatggtggtttgatcaattctttaaaaacggagggaaaaccgacatcatcggcgtttcgttctatccctattgggaaggtaagccgtactgggagctcaccggccatttatcatctaatttgaatgacatcgcctcacgctacaacaaggaagtcatggtggttgaactgggcggagatgaaaataatccgaaagattcctactggaccataaaagacaccataaaactggtgaaagccgttccgaacggcaaaggaaccggcgtattttactgggaacccgaagctcactccagcgttctgtcagatgcgtatccattaggcgcaaccgcaaaagtgtctaaaaacgtcttgaaatacacaaccgcaattgacgctttttatgatgccgcaacaggaaaatgattgatgcaattctaaagcaggctcttttcgcagcctgcttttttgtaaggctgcagagttagcctgttatgaagagctaataacgaatacggaaagaaacatactcgaaaaaccacatttcggttaaaaataggatacttcttctgttccccctccttcttatttctgcgcactatctctcagttcctaaataataactttacgattgttgaaaaagaaacaaacattttataatattgtgtaagcaccaccgagcaggaggacgggtcatggacaaaaaagaacagctcctcacggatttcagggacttttttaacaagatggtgtggctgaataggctgaagatggaagaaagccttaaggggcataaaccttctgaagtgcattgcatcgaattcatcgaaaaaattgaagacgccaatgtgacaaaacttgcggagtccctttatatgacaagaggcgctataagtaaattaacgaagaagcttatcaataaaggccttatcgaaagctatcagaagccgcttaataagaaagaaatctatttcaggcttaccgagcaaggaaaagtcatttataaaattcacgaggaattgcacaaagagtttcaagaacgggacaaaatcgtgtttgaacaagtaactgatgaacaatttgacacgatgctgagcttcgtggaaacatacagcaggcatttggattcagaaataaagaaacttggtgcagacatgaaatcggaataaaaccataggcagccctgctccatgaaaacgggctgcctttttatatccctcttattgttgacaaagaaacaaaatcactctattattttgttgacaaggaaacaaatacggcgattttgagaggagaataatatgtcaacacataaaagaaaggaacttcggctgccaaaagaagttctcacagccgcctgggctattgcactgggagcaattgctccaatgcttgactctacgatggtaaacatcgccatcgacaaactgaccaaagacttcaacacgacattggataccattcagtggtccgttacaggctatatgttagcacttgcgattgcagtacccgtatccggctggcttatgaataaatataacggtaagaaaatcttcatcggctcagtcatcgcctttggtgtcatttctgtttttgcgggaatgagccgtgacgtttccagcttcatcttcttccgtttgcttcaaggattcagcgccggcattatcactccgcttatgtcaacactcttggttaaaacggcaggtccggaaaacctgggaaaagtgatggcaatcgtcagcacccctatgatcttcggcccgatcttaggacctgtcatcggaggcttcatcgtccaagtcgcttcatggcattggattttttacatcaacgtgttcatcgttttggttgccgcaccgcttatgatgaaaaccattccagactttgaaccattcaacaaagatcgtaaactcgatattttcgggattatcaatttgtcattaatgagcgcggcattgatgtacggtattacgaaagcggcggatcatgcatcatttaacaatagcgacaccattttatgggcgggcatcggtcttgtttcagcagtcatttatcttgtatataatctgatcaagaaaaaccaaaccgtgctgcctatgaatttgtttgcaaacaagagcttcttagcatcttcgatcgggttgttcttagcgaatgttgccatcatggggccgatgttaatacttccgctgttttttcaagacattcgtcatttcacggcagtcggagcagcactcgctttaatccctcaaggagtcggaatgctcgtgactcgtccgctgatcggaaaaatgattgataagatcggtgcgaaatacgtggttacggtcagtcttgttctttcgctgatcggatctatcccgcttatttttatcaccgataacacaagtatgatttggatttccgtcgtattatttatccgcggcaccagttttggaggaattatgctcccattaatgagtgacgcttatacaggtcttgacagcaaacagcttccggaagcaggtgtcggtattcatatgattgaaaacctcggttccagctttgggtcagctgtgatcgcaaccgttaccgcaactgtcatacaaggattgcagccaacgattccgaacagtttaaaaggctaccatgccggattcttagtatccgtcatcatccttgcggccatcttcattccaagtctgttccttacccataaaaagactgcgatataaagaacttttcaaagtaaaaaacccttgcgcagcaagggttttaatgaatgaaactgatgattgttgccggcagagtcagccaacaacatacaaagccttttactcattcacattgcttttcattaaccattctacttccgttaattcttgtttttgaacgtcttttgtgtgctttttcgtaaaatggactttaacagcttcttcgttttcccaaatctcccaaagcataattttgcgttctgatggttcaagcggatgagcatggaactgaatacagccttcttctttgttcgtttcttcctcaagttttttgaattccttcattatttcattaaggtctttatcactgatgatttttaagcatgccgttatgtaatgcatcgaaactccccctcttcccatcattttatggctttacattataacatcgaaacccgcataccgcattctcaacatataaaaaaccgtccataaaaaatgaacggcaatgtttatttaagatcatgaagagcgacttttgcagcctcagcgataagagcattatgataatcggcatcttctgtaaatcggtttgacaggattgccaaaacaatcggagctctgtcaggcggccaaacgatggcaatgtcgtttcgcgtcccgtaacttccggctccggatttatcgccgacttcccatcctgcaggagcgcctgcccgaatcagttcatcgccggtagcgttgccccgcatccaatccgttaagatcgtgcgcttgtcagtcgtgagagtgttacccaaagtgaacgctttaagatcggttgccagtgcctttgctgtgcttgtgtcacgacgatccccgggaatcgcagagtttagatccgtctcgaatcgatccgctttcgttacatgatccccaatctgtttcagtgatttttcgaaacctttagggccgccaagctgctgcagcaataggttccccgcagtattatcgctgtaacggacagcggcttctgagatttctttcaggctcatgcctgtatccaggtgtttttctgtgattggagaatatgtaactaaatcgtctttgctgtagcggatgatggcattaagtttttcatttgagcttttcttcagaacagcagctgcagccagaactttataggttgatgcgtaagcaaaccgttcattcggccgataggcgattgtcttgtttgaccccgtatcaatcgcataaaccccaagcctggcatcaaattttttctcaagctgaacaaatttttgattcgttatacagcttgtcatttttgtgttttctatggattttgcttcagcgtgcgtagagccgaataaagggctgaaaccggtaaagcttaaacataaaagcccaatgcatattccaacttgtattcccgctttatttttcacatccagacctcctcattataatgtttttgtatacatcttctaattaacattacaaacaggatgaaagtcaatatatttcctgtgaatgattaaatcctgcattctgattcctccccttattaaatgcgccgcccttgccgcgtctgaatgtttgcatgtccgcttcgtgttcattatctatttgttatccctccgtgcaaataaaaacggacaccaatcagagcatagtgagctgtgcaatgatcagtgtccgcaggctttccgtcttggatctatatatgtttctcttgcagactataaaaatcataaggtaagttaacaaacgcattaccttaatctcgcggtcaaaattatatcattttatatatttcaataagattattatctggatctctgaaatgagcaactcgtgcacgccattcctgacgatcatgtggttcattgacgcatgtaatcccttgcttgtgcaaatagtcatacgttttatcaacatcttctaccttaaattgaagcaaaaatctcgattgcgaatctccgtctaaagattttctttcttctccaactatttcagccatattttcttgagataaaagctctattttcgtttctccattatcgaaaagtgcatattccatttccttctctaaccaacttattggaagtcctaatgaatctttataaaactcgacgctttttttaaagtcattaaccaatagtctaatttgcagcagtttcatattgaacgcctcctatcattttactggccattcatttaatcatacaatagggacctgacagcattatgtcaagtttccacaaaaaaatttcccatactgcacccaaatttcggatggaaagccttcgaagattcatgaaactgcgtttgatcaattcacattcttagtttgaattctcctcctctccaccgtggaggctccggccgtgtaagtcgcgcacccgtaaacatccggcccccgctcccataagtaacacaactgataaataattgactgagtcgttttttcaccgtcatcgcttcccctgttttttatattctgcgatttccttaggggtagccttccggactccgtctgtgtctgtcctgtttgccacttgagcgccttccatgttttttatctcgctgacgactcccaaatgctctaaatacacatgatcaccaatcttgaaacgattcagtttggcccgctcctcggtcatgctcctgtattcagtcgcggctttcatttttaattcagccagacacatttgacaaagtgttactgttacagaattgccgttaaaatcagtaaacgaaaccgatctgacagattccttttccgggtgcatcgtacatgttttcttcataggtgaaggccgtgtaaatttaatcattccgcttcctcctcaaaaaagtcttttcgtccctctgacataactcggatgaatgggaagttccgtacccccgcattcgaactgtcacaacacatggagattgcctttccttcgccgtctgacggattttcatccatcctgcatagctgtaagcctatattcctttatattcccaatgcccgccgcacttccctgttatgatgaagtttttaaagctattgaccagttgcccaggttgattccatgcggaaagcagtttgggccgccgtatcctaattcattcgggtaaatttcagccctctaatatgtgtgtgtatgctttttaaaggaagtgcgtcacatgatgttctaacaaccgattcaacctaaagctaactctaccccaattcccgatcataaaataagtaaatttacccagaacaaattaatcattttgcactttcaaaatacttatttggcttttccttcattcttccatggtaatatcttgttgaagtatttcgcatgaaaggatatggtcatgaaagttttcgaagcaaccaccctcctcgccgccgccaaacagcgtgcgggtgaatataaaaaactgcgcggtcagatggtcaacctaaaaaaagcgtttcaaggtatggctgatcttggtgacaatgatttctcaggccggggcgctgacaatatcaaagcctttttccaggatcacgccggcgtcacagacagctggcttgatctgatcgatatgaaaatcgcatttctcacaagccttcccggcaaagtcgaagacgcaggtctttccgaatctcatgtagaagaatcttttctggagcacgagctcacccatgccctcagtaaatcaaaggcgattatggaagcgcagaaaaaagacatgcgctccatcctcggtgagatcgaagacatcatctcgctcgaattgttttcaaccgaaagcacagatcaaaagctttcttcagctgacaaaaaaagaagcgaaaccatacataaactcggcaagcttgatcacgatctaacgaaagaatacgcagaaaccgaagcgaacgaacagtttatccaagccgactttcagcagctccaaaacgccacaggcaaaggaaaaagcgccacgccgcttcactacaacgccaaagcgtaccgtgaaagcgacatccataagaaaaaaggcgatatcgcaagacattcggatgcttatttgacgattaaaaaggaagaagcgaaagagcgtgaaatcaaggatctgaagaaaaagctggctgatggtgtcaccgatccggatgagtatttggaaatcgcaaagaagatcggctatgaaaaccttgaacccgctcaggtggaatatgtaatgcagcttgaacaagcaaaacagcttgaagaagtcggagaaacggcttgggatatcgtcaaaggaataggcgtcggcctttatgatgtgggaaaagacaccataaccggcgtcaaagatctggctgtcggcgcatgggatttttaccatctctccgatgaacaaaaagtcgctaaaaccatatcggctgtattgaacacgccctcctacgcaaaaatcatatggacaaacctggcggattcgtggaatgataaaatggttaacggggatgcgtattcaagatcccattacatcacttacgccatcgggagcatcgtcgggctcaaaggttccggctcagctgtaaaagtatcaagcaagctcgcgaaaacaggcgccgccaaagtggataacgtcttggaagccggtgaaaaagcagctgcaaaacatgtaaaaaccgggattgaaaaaggaaaaaattatatcaattccgtttcgaaaaataagtaccaacccgcgcttgccggaatagcacaggatattgaaaatactcacaatgtgaagaatactcctttgttgaaaagtattattgaagatcagaaagagagtgtgctcagtaaatctgtgacttctgacaataacggcatacatagtgttaaacaaggagacagcagtcctctcgcaccaggcggtggcttagctgctcacgaagcaaaaggcggacaccttctagaaaggcatgttgggaagactgatgaagagttattacagaggctacagataaacaagaagatacgtgcctcttctagtttcactgataggccaactgcagaaagagtcgctaatgaaacattaactaaacataaaaaggaaattgaagagtggttaaaaagtgatgttaacgatccattaccgttaccttatagaggaaccgaagttataggtagaggagttcgtaaaggttcaaatgaagttaaagatatgactaatgctagaatagtattaaagaaaaataaagatggtagctttatactaacaggctacccaacgaggtgatatataatgattgaaattaaagtttctgatcctgtatttagatttctcggcggacattttcaccaagatatagagtctccggaaaatgcacttgatgaatatttaaatgaagcatcacaaaaactaaaagaaagagatttaatagcactaactgagtttgtaaatagtgattattcagaagaagacaagaatgaatttatagaggaagcagcggatggtatatactttcctgaagatgatataactccattagaatggcttaagcaagtcactgaacaaattaaaaagcatcttaaacaacatagttagaaaaagagccctcttttaagaagggcttcttttattaattcaatttcgctttcgtttttggtccgcaaattccgtctggcttcaaaccatacatgagctgaatcgtactgaatcgttcagccgcatttactgatgtaagtgaatttaaataaattgcaaaaaaaccctcctcatcttgagaagggctctgacttatacttctttttctctaaatcagtccgaagcaaaaaactgatgccgctcaacttttcaatcgaagtgcttcagcgggttctccaactatttgcccctatgcttttcttttgctttttgttttctgattaaatattcttgttcctttattttttctctttgttttttcttttcttttttcaagctcctgttttattgcattttgcgccttagttgatatcccgatatttttcatctctttagaagcttgtcattgcaatctttttggatttaatttcttagattttgctttaacacaaccccttcttgttcagtgtgggagagagtctgtaaaaaaggaaagagtctccgcttattttaacaacacttcaagttttgctttggttcaagcgcataaattccatcagcttttaatccattcaccaattgaaatcgaattactgcattcgctgttttcgctccatatgctccatcaatcccgaagttcttccgctttaataaagggccgacagcgccgttcgaatctgttttacgctctcccctcgggttttaatgggcttttgacttaaaaaaccggaaagcaaggggaagtatgatttcttgccttaggatggagggccccctgtatcacttctttatcatcgacggcaaaatgatatctagtcgattcactgctaccggtcatataactgatttcattagcggctgcatgcgtcatttcctgtgctgtgaatgatttccagattttcgctgtatttttcatacaaaactaaatattccgtttttcaaatacaaaaaaacagcaggattaaccagctgctgatcgttatcactttagccgttcagtgatacggaatttctgtatttctctgtaatgaacaggtttcggcaaagaccgccgccttaaaggcgatgttcacctcccttgaagtatacagcgaatgtacttcaaaatcggcccaaaaaagcagttccgtccccaattcgtccccaactcgatgaatgatgacaaaatcaataaataagcaaagtaaaaaacccttgcaacgcaagggttttggctatgattccgactgggctcgaaccagcgacctctaccctgtcaaggtagcgctctcccagctgagctacggaatcatgatatgtatgtgttgctgggtatgttgttgtctctctgacatttataattatatatcctgatttctcattcgtcaacactttttttatctaaaataaaaaagggcgcgtcgcaaaattgacggcacccttttcgtttatgatctcacttgggcgggggttatttttttcaatgcctgttcgaagtcgcgttctaaatcttcggcgttttcgactccgacgctcaggcgcagaaggccgtctgtgatgccgcgtttttccctctctgatttcggcatggcggcatgcgacatggctgcagggtatgagagaatggactcgacagcgccgaggctgacggcaaataccggaagcgatacgttttcgaccagctttttgacggcttctttgctttccaattcaaaggacaggacggcgcccgctccgctcgcttgacgtttatgggtatcggctcccgggtgtccggcaaggccgggatagtaaacgtttttgattgcgggatgcccgtcaaaataggcagccagccgctcagccgtccggctcgctttttccagtctgacctgcaatgtttttaagcctctcaatacgagccagcagtcctgaacaccgagcaccgctccaaacgagttttgcagcttatacagctgattgccgagctcttcatcttttacggcggcaaggcctgacagcacgtcactgtggccgcttaaaaatttcgtcgcgctgtgaagcacgatatctacaccgagatcaagcggacgctgcagagcaggcgtcatgaatgtattgtcaaggtatgtcagacagccgtgttcctttgccagtttgacgacgcccttaatatccgtgatgccgagcgtcgggtttgacggtgtttccatataaatggctttcgtgttcggccggatggcgcaggcgaccgcttctgtgtccgtcatatcgacaaaggtatgttcgattccgaaacgggacagaacctcagtcaccatgcggaatgttccgccgtacacatcctccgtgacgagaacatggtcgccttgggataagagcagaaacgccgtcgaaatcgccgccataccggagctgaaagcaaaacctctcgttccgccttcaagacctgcgatcgtttcttcaagcgctgttcttgtcggtgtgcctgatcggctgtagtcatatgtcccgaattcttcaaatgaagactgatggaatgtggaagcatgctggatcgggacgctgacggctccggtggctccgtctgttttaaatggattgtgcacgagctgggtttccagcgtccaattgtgattactcatatgacacggccccctcttttacttgctgtaatgcctgctttacatcccgcttcaaatcttctgcatgttcaatgcccactgaaaaacgcagcagacggttgcagacgccgtttgcgatacggatatcttccggaatgtccatgtgcgtctgtgtcgcggggtatgtaataaaactttccaccccgccgagactttctgcgaaacagatcgttttcagcgcctttaaaaacggattgacccattcttctttttgcagccggaaagacagcattccgccttttccgggatataacacgtcggcgatttcctcttcctgttctaaaaattctgcaagttcaagggcgttttcttcatgacggcgcattctgagtccgagtgttttcatccctctcattaaaagccacgaatcaaacggcgggagaacggcgccgatcgcattttggtgattaaacatgatgtcgccgagctcttcatccttaacgacagccagaccggcaaggaggtcattgtgccccgctaaatattttgtggcgctgtgaatgacgatgtccgctcccagttcaagcggacgctggatgaccggggtataaaacgtattatccacaatcaaaagcaggccggcttctttcgtaatccgggcgattttttcaatgtccgcctcctgcattaacgggtttgtcggtgtttcaacaaatagcgctttcgtgttttccgttattttggagcgtaaacagtcttcatcgctgaaatcatcgtaaataaagcttaagccgtattttctccattcgttttcaaacaaacggtacgtgcctccatataaatcggaggatacaatcaattcatccccgcttttaaataaagccataatggtttgaatggctgccattcccgagctgaaagcaaatcctctcgcaccgttttccaacacggcgatggcgtcttcgacgagctggcgtgtcgggtttttcgtgcgcacgtaatcaaaacctgtagattctcctattcctctatggcggtaagcggtggacagataaatcggcggactgaccgttcccgttgcttcttcgcttctatttccgatttgggctaattttgtttcaacatgctgcgtcatcagtaagcaccatcctttttcaaaaataaaaaagccccctcttcataagaagaaggagcttttctcttcctcttatcttccaagcgtgaatcgcttgctggatttagcaccttggcactttgccttcccgcggcaaagcaaaccggttgctgaggtttcaaagggccagtccctccacctctcgtgataagaatattgttttgtattttctgattgttctatattaacgcactataaaatagatttcaacaactttttatttatctgaactctcgcaagaagtgcatctgaagaaagaaatttctaataattcatggtacaataggaaaaaaccatcaagacaagaagcggcctggaggaatgcgaagtggcatcaaaaaacggaatcattcatgagaaaacacttttctcccatgagcttgaagaggaaatgaccgttttggtctacctgcccgccaccttctcccccctgtataaatatcatacggtcatcgctcaggacggccatgattatttcagattagggagaatcgggcgtcaggcggaagagcttatgtcaaaaggggaaattgaccgctgcatcattatcggcgtcccttataaaaatgtgcgggagcgaagaaacacataccatccagaaggctctaagttcgcctcatataagcggtttatcgccaatgagctcgttccttttatcgacaaagaatacccgacttatcaagtcggatacggccgcaccatgatcggggattccctcggcggaaccgtttcgctcatgacggcgattgactatccgaatatgtttggaaacgtcatcatgcagtctccgtatgttgacgggcacgtgctggatgccgtccggcagtcggaggatctcaaacagatttccgtttatcatcaaatcggagaaaaagaaaccggcgttcacacgacggacggccaggttcttgatttcaccgcgccgaacgaagagctcaaacagctgctggaaagcaaacagtctgaatacacgtatgaaaccttcgacggggatcataaatggacctactggcagccgctcatcacgccggcgctgaaaaaaatgctgtaaccattcatttaaggagggaactttcatgaaatacggtattgttttatttccatcaaaaaaattacaggatctcgcaaattcgtaccggaaacgctacgacccgagctacgcgctcattccgccgcatctgacggtaagagatccgtttgaagcgacagaacaggaaatcgagcaggtcgtatcacagctgagacagacggcgaaagagtcgcatccgctcgttctgaaaatcacaaaatacagctcgttttctcctgtgaataatgtgatatatatgaaagcagagccgacggaggaattaaaatctctgagtgagaaatgctactcaggagcattatccggcgagccggaatacagcttcgttccgcatgtcacggtcggccagaagctgtcgtcagatgaacattccgacgtactcggacagctgaaaatgcaagacatttcccacgaagaagtcatcgaccgttttcacctgctctatcagctggataacggctcatggactgtgtacgaaacatttttattaggcggaggagaataactgcttggaatccatcatcgtaaaaactgaaaaacagctgaacgacgcttttttcgtcagaaaagaggtctttgttaaagaacagcacgttccggaagaagaagagattgatcaattcgaagacacgtcagagcatatagtcatatatgacggcggccagccggtcggagccggcagatggcgcttgaaagacgggcatggaaaattagagcgcatctgcgtaatgaaaagccatcgttctttaggcgtcggagccatcataatgcaggcgcttgaaaaagcggcggcagccaagggcgccggcagctttatcttacatgcgcagacgcaggcggtcccgttttacgaaaaacaaggataccgcgtcacatccggcgaagaatttctcgatgcgggcatcccccatctggaaatgataaaggaatacaaacaataaaaacaaaagcactcctgttgatatggcaggagtgctttttttatgaaaacaataccgtttcatgaattttattgcattttatggaaggttaatgtatgtttagtatacgaagtattacaattcatacaaaaaatacaattcatatttcggagggataaacatgacggcaccaaaaggaaaacacatattcgggactgttaaagtgggcacaaaaggacagattgtcattcctaaagaagcaagagatgttttcgatataaatccgggggattcactgcttatgcttggggatgaccagcaaggtatcgcacttgttaaacaagaactctttttcgagtttgcaaaagatattttaaacgctaagcaaatcgacgcagatagcgaggatgagtaaatgcacgcgattgagctgaagcaattaacgaaacattataaagaaaccgccgccgttgaccgtcttgagttctcagttgagaaaggggaatttttcgctttactcggtgagaacggagccggaaaaacgacattaatcaatatgctttgcggactcctttctccggatgaaggtgatgcatcagtgcttggacacagtatttcgactgatttggataaaataaaaccgaaattgaatatgtccccgcaggaaacagccatcgctcctcatctaaccgtacgggaaaacttagagtttatagccggagtctacggaattccgaaaaaagaagcaaaaaaaagaacagatgagatgctcgaattgtttcaattaaaagagaaagaaagagcaaaaaccaaaaccttatcaggaggaatgcagcgccgcctcagcatcgcaatgggcatgattacgaaaccggatatttatttcttagatgagccgacattagggctggacgtccgttcacgccgcgagttgtggaaaaatcttgagacattaaagggagacatgacgattattttaacgacacactatttagaagaggctgaagcactggcagaccgtatttgcattttagaaaatgggacattaaaagcactgggcacggcggaggatctgaaaaaacaaactcattcagccacatttgaagatgcctttttagcgatttgtgacggagaggcgggtctttatgcttgatttcgccattcgcaaccgcaaagagatttttcgtgatcccttatctatcatccttggaatcgcactgcctgttattctattgtttctgtttacggcgattgaaaaaaatgcgccgcttgatacctttaaaattcagcatttagcacccggactcattgttttcggtttcgctttccttacgatgttctctgcattgctgatcgcaaaagacaaacagaccgcccttttgacccgtttgtttgcttcccctttaaaaacagccgattatgtcatcggttacgcactgccgatgcttccgttagccattttacaaatcgtcatttgttttatcgcagctgctgctgccggtttatccgccgagtggatgaatcttctcgcaggtatcgctgtcttgctgccgattgcgatgatgtccgttttcttcggtttatgtttaggggctgtgtttacggacaaacaaatttcaggtatcggaacgatttatattacactcgtgcaatttctgggcggggcttggatggaggtgagcctgctcggtgacacattcaaacatatcgcttatgccttaccgtttatccactcgatcgagctggctcaggaagtcatatccggagattattcttcctttcatcagcatatttggccgatagcgggatataccgttttggcgcttgcacttgctttcctcagttttataaaaatcaggaagagttaaaaaagccggcactccgtaatgggagcgccggtcttcttttttacgtttctttcagaaggcttatcgtatgcggcagcagacggtcatcccccggactgccatggcccggaacgacaatgctgatgtcctgatatcttttcatgactttgcggacggcgcgcggccactgatccggataaaagcccggagttggtatgatttcctttgtttctaaagccttgattaagcaaccgccgaataagagcttatcctcaggcagccagacggtaatattgtcttccgtatgcccttttcccggataaaacgtttcaattttcatatcgccaaactgcagctttgtcacgtttttcaaatctccgagcggccggtcatatccctgctgccgggcgaagtcggcggtcagcttcgtgctgtgcacctttacaccgtatttgtacagtgtgttcagcccgccgatgcgatcgtcatgggcgtgtgtcacaatggcatcggtcatccttttgccgggaaaccgctgttttatttgtgtcattaattgctctgtgagactgtcattccacggagtatcaatcagtacgattcctttggaagtttcaagaagcaatccgttcgcagggacgggacttccgtctgccgtaccgatgcttgtatgcatccagacatgcggcgccagctgtgtgagagtgacatcttttgctgcggagctctccgccgcgtgtgccggtttcattccggcagtaaagaggccgaatagaaataaccccgcaattaataatgaaagctttctcaaattgaatcattcctttccgcatctttcatatatacggctcaaaaaaacccggagatttccgggctttttcacacatattgatttatcaaccggccttttcccataatttgcggcagacgggaaagagagcgcttacgtttttcctcatgcattttcttttctgcggctgcggtgttttcctggcggcgctccacctctctgtacaccctgtcattggcgagggcggccgctttcgtaatgccggcgtaatcaggcttataacccgctgcccggtttgcgtattgagaatactgctggttttgaatccgtcctgcataaatcatatgtacccctccccttcgcttttcatttcccttaatcttactttttgaaacgcggttcttttgttatgatattctttgtctatcaaatggatgaacaccttttaatgggaggacccctttttgaaatgcgcccgactgaataaccgaacgatacatttacatacatattctagagaacattaccaattcctttttgaagaagctcagaaaggaaatattttttgcgcacattgtgaccagcctgtcttgatgcggctttcgattttagagcagccggcattttatcaccggcaaaagggagacttcaccgcctgtgaaaaagcatgcgccgccgaggaaccacaagcggagaaagaaaaagaagagtataaggaggcaggcatgttccgcctgccgaaaggaaaagcgatttcagagaatccgaaaccgatcgtctcagaatggaaaagcccgaaaaaagtgcctgcggccgaaccgttttcaccaacatccgaggcagctgatacatctttgttccccggcatcggcctgaaccgcgaacagatgcgggcagtcacggaaacggacggccccctgctggtgcttgccggagcgggaagcggaaaaacaagggtgctgacagcccgcgccgcccatatgattgaacacctcggcatttcacctgagaatatgctgcttgtgacctttacgacaaaagccgtcgccgaaatgaaagagcggatggcgaatgagtacgggctggcagccggaaaagtctcccgtctcgtgaccggaacattccacagttttttctataaaatactctatcattatgattcttcaaaatggaacggcagccagcttttaaaaatggagtggcaaaaagagcaatatgtgaaaaaggcgctctatgaagaaaatttggatgaaaaagagtttcccgtcgaccaggcgctgcagcttatcggctgctggaaaaacacgtatctcccccatgagaccattccgcttgcggacgactgggagaaaaaagtgtaccggctctacgaacattacgaacggcagaagcgggaaaaacggcaatttgattttgatgacatggcccaaggctgttatgaactgtttcaaagccggcctgatattctcgcgcagtaccaaaacagattttctcatattttgattgatgagtttcaagatattaatcctgtccagtacaacattatgcaaatgatcgcaagcccggagaataacctgtgctgcgtgggtgatgacgaccaatccatttatgcgttccgcggcagcagcccgtctttcattcttgattttcaaaaggattatccggcagcaaagaccatttacttaacggcaaattaccgctcgccgcatccgatcgtctcaagcgctcatgccgtcgtaaagaaaaataaaaaacggtatgaaaaaacactttctgccgtcaaagacggcgttcacaatcccgtgatgttttatccttacgatgaagaagaagaagcgaccatgatcgtttcggatatgaaagagaaaattcaaaacggggcgagtcctgatgattttgccgtgctttaccggacaaacagcgccggacgggccatttatgaaagactgcaccaatcatcgattccttatcatgccgaccgtggcgtgcagacgttctacagccgcagaatcgtacgccagatcctcgcctacttatatgcgagtcagaatgaagatgatacggatgcggtgaaagatctgctgcccgccttatttttaaagcaatccgccctgcaaacgttaaaggcgctgtcaatcacggaagattgcacgatgattaaggcactgacgaaactgcctgacctgaagccttttcaaataggaaagatcaagcagatcgttccgtttttcgcaagcatccggacaatgaagcccgttgaagccatcacctttgcagaaagcaaaatgggtttttccgagtatttaaaaaaacggggcaatgagggaaacaaactggaaaaaggctctgatgatctcagggatgtcaaagtggccgccaaaaaattcaaaaccattcccgattttcttgcgcatgtcgatcatatgcgcgccgctgagaatcagaaaaccgatgaaaacggcgtcgaactgctgaccattcaccgctctaaaggtcttgaattcaatacagtctatattttaggcgcggctgacggctcgataccccatgacttcgcgcttgagacagcgagacagggcgatcccgctccgctcgaagaagaaagacggctcctgtatgtcgccatgacaagggccatgcagcatttatatgtatcttgtcccgcgtacaggcggggaaaaacagcgcgcagctcaagatttctcgagccccttcttcggacggacagacggagcgcactcaggatataaagaacccggcagatcactgccgggttcttctcacataaaaaggcctttttagcaaggccggctgacgcctatttattgtttaacattttagaaatggtgccaaaatcaagtttctctttaccgcttgtaatcgattgaacgattttgtcttccaattctttcggaacacgcttgttagccagctgggacaccttctgaatgacgcctctcaccgtgttttcatctttgaaattggcattttgcaatgatcctgcaaggttcatgacatccttcatgctgacgcctgttttcttctcaatatttttaaaaaattgattatccatggtgtgcctccttttgtggagtaatacgatattgtatgaataaagggcggaacgtgtgcccgtaagacaaggaaaaaattccgcatctccttctctatccttcatacattagggaagcacgggactgaacggtcccgcgcttatccaaagtcttgctaaggtttagccaaaaaaggatgcaccgacaatgatcagaaggatgaacaatacgacaacaagaacaaatgttgagccgtatccgcctccgacatagccgcctccgtatccgcagccgccgccgcagccgtaaccgccgtagccgccgccgaatccgccatatccgaatcccatatttaagcacctcctttactctctatactctatgtgagccgacttgtttggcttggataaatgcatagggccggtgcggatttcttttcattttattgagaatgctcatttttcttcagtttcgcttctgtttcggcggcaaacacatctatccattcctcaaagcgcgctcccgcttcatcaaactcagacagctgtttttcaatagataagatatagttgtcatgctcccgctgattttgattgtgccggcggtatttaccgtttatgaatgattcaaatatattcataacatcccctcctcctatgatctatgccgggcagaggccggcgttcggcaaaaaacaaaaaaaccggaagctccggttttttttgaaaacggctatttcggttttttcttttggccgcagccgcagccttttttcttaatttttttttcgtaaggctgatgcacagttgatttgtatggagagtgttgggaaggtttgcttgattgattcatggtgatccttcctttccttatgtcatatatgccagtttatgccgaaagtgacggtaagttgctggtggaaccgccttattcctgcagaagacgagaaaccgcagcttcaatgatcccggccgcgccggctatggctaacagcaaaatcagccattgcgcagcctcggggatcacaatctgcgccgcaattaaaaaggcggcgcaccatacgcccgtacaccaatagcagctgagaagttcaccgataaatgccctgatgccttttccttttatgacaatgtaggtttctgtcgtgccgtcgggtgcggtttctgttttttcctcgtgaaaaaggctccgaagcggcgccataatggtgtcaaatacgaaaagcctggccagccggaaaacggcaaacgataacagaataaatgaaagccaattgataaccacctgttcactccttttcaaaacttgacctctttatacatatgcgaaaaccctgatcttcatgaatcgcaccttgtccggtaaaaaaataggtgcggtttagttgtttttcttattccgctcggcgtttcatttgcattatatagagtatgaatgagaaaggagtgaaggttatgtcgtttgaagaaaaagtcgaaacactgcaaccgcaaatatacgaacaattatccaacgaattcgagcagacgatcgaagtgattgattgcgaaaatgtcacaatagatacaacacatataacggccgctctttctatacaagcctcagttactacggcgattatcctcgcgacacagctcgcgatcgcagatgaagacacagccgaccaaatcgcaaccgaactgctgatcctggatgattgccaaataaaaaagaggaccgtcattcaagtcctgaacagccgcaatattaaaatcacactgacagcagacgatatcatggcctttgtacaaattttgtttcaattattaaatatactttttgctgaactagacatcctttaacctttcttttcaaatatttaaatagaggtgagaacaaatggcagataacgaaaaattaaaaaaagaactcgaaaatctaccagaagtggatccgcttttaaaggtgcttgtcagcaatgtcttcaaaaaacacggcgtgacaaaggataaaatgcgggaaatccctgatgaagaaaaagaaatgctgatcgcattagtcaaagacatgcaggcgaaaacagaagcttttcttgaaagccagaaacagaaaaaagagcaggaaaaagcgcaagaacagcagacaaatccgcaaacccgcagagaacaattaatcgaacagctccggcaaagacgccaaaatcccggtcaataactaaaaaatagtgatttttatcaggatagatgcctgagtcaaaataaggggccggctcatttaataatagtaaaagaaaaggaggaatagatatggaaagcagaccatactcttgggttgcacttgatcctgaatgcgaacatccgcgagaagaaaaagaagaaaaagaaggaagaagatgcagtgtttgctgtaacggacatggatttggcgaagataatgccttccttgaccaagacctggctcaggcgaatatcaacaaacaagtttctgaagaagcgattattatcagagactcttgtgatattaacgtaacgtcaacagacgttcaagcagtcgcttcagtcatgacagcgattaatgcagcagtcgtaacggccactctcacttcaattgctgacggagtcatcgctgaattggtcgcacaagacttattgcagctaacagctaacaaacaaatcaaccgtcaaaaattgctcatcgaaaactcccgcggcgtaaacgtgacaacagtagatgccgatatcgcagtgttgatctcaacagcgacaaatttactgattgccgtcttagtcatcacccttgtcctctaaaaagaaaaagcagagctaaaaatgctctgctttttcttattttctccgcatatgatgaatatatagacgttcacccacaccaagtgaggctcgcgtacatatgttgttaaagacaaaagtcaaataccctaaaagaaggagctgaaatccatgagctgcggaaaacaccatggccgagatgaaagttgtgtatgcgatgcagtcgagaagattttagcagaacaagaggctgttgaagaacaatgcccgactggatgctataccaatctgttaagcccgacggttaccggtaaagataccatcccgtttctcttgtttgataaaaaaggcggtttgttctccacattcgggaacgtcggaggatttgcggatgacagccagtgcttcgagtctattttcttccgggcagaaagagtttgtgattgctgcgcaacgctttcagtattgcgccccgtagatgtgcacggcgacaccctcagcgtctgccatccttgtgacccggatttcttcggtttagaaaaaacagatttttgcattgaagttgatctgagctgcttcagcgccattcaatgcctttcaccggagcttgttgaccggcctgagccgcacaaagagaaaaagcatcacggatagtcattgattcgcatctttcctaaagaagaatccccttccaaccttctattacagatgcaatcatcagcccgcccggacttccgggcggctgactctccgatatcgtttaatccggtatataaaacgtgaagtcaggagggatattatgagcaagcatacaacatactgtgtgcgtgaagcggtagaaaatattgaagacctgcaaaatgcggtcgaggaagattgcccggccggatgctattccaaccttttatcgccgggtttttcattaggcgatacagtgccgtttgtacttttcacttctaaatcatcaccgtttaccgcattcggaaatgtcggcgagctggataacggtccgtgttttaacaccgtttttttcagagttgaaagggtctgtgacggctgtgccacattaagcctgcttattgcttttgacgagcataagcacattcttgattttacagataaagactctctctgcgatgtattccgtttagaaaaaacgaactattgcgttgaagtcgatctccatagcttctgcgccatcaattgcctgaacccgagactgatcaaccgcacacattcttaaatcaaaaagcataaaaataagctgccggattaaagaattcaggcagctttttgtatggttaaaatccaagcggatgcagcgaggtaatatcgtctattgcgagttctgccggcgctccgttgcttgtcgtccgcaggaagatcgcattattttttcttccgacgattacgcctctgtaggttttcccgttggcttctatcagacaaagggtccgcggcatattatgcggcagcttcgttaagaaatcaattttttcaagaatggacattctgctcatcggctttttcacgcgctttggcgggaccttttcctctggggcggcattgtgaaccgcttcaggctctttttcagcggcttcaggctcttttttagcggcttcaggcttggcagtgtcctgctccgcttgcgccggaacttcttgaacggcttcttctgagcggctgtgctgttcaggtacttgcttttctggttcgacagccactgctccttcaggctgagttttacattcttcctcccgctttccatgcatcggctcttcttccggcggctgcggcgctttcctttttttgattaatatgtcctgcattgatgattgcgtgtctgaataatccgcctgaacaatatacatgagcggttttttttccgcgtttctgttttgttttgacatcttcatccctccgattctgtcatgttttatttatatgacggaatgattaaaatcagaagaaagaaaaaagcaatccctgaaagggactgcttgttatttaacgtgcggtaatatggaatcctgaatccacgtgaagattttcgcccgtgatgcctcttgacaggtcactgaacaagaatgcagccgtgtcgcccacttcttcaggtgttgtcgtgcggcgcagcggcgcgcgctcttcaatttctttcaggatagagttgaaatcactgattccttttgcagacagcgtacggatcggccctgctgaaatgctgttgacgcggatgttttcttttcctaagtcagcggctaaatatctcacgctcgcatcaagagacgcttttgccacacccattacgttatagtttgaaacgacgcgctctccgccgaggtaagtgagtgtaacgatgcttccgccttcagtcataatcggacgcgccgcttttgcgaccgctgtcagagagtaagaactgatgttatgcgcaagcaggaatccttcgcggttcgtatttaaatattcgccgacaagctcttctttgtttgcgaacgcgatgcagtgcgcgatgccgtgaatcacgccgacctgctctttaatgcttgcaaagcaagtttcgatctcagcgtcatttgtcacatcacacggaaggatgatggaatcatttctttctaatgtagccgcaaggtcatgaactgatttttccaagcgctctcccgcgtaagtgaaaatgaggcgcgctccggcttcatgcagcgaacgggcgattccccatgcgatactgcgtttattggcaacgcccatcacaacgatgttgcggccttcaagtgagaaattcatatgtataaagcctcctgtaatcgtcttaaagacatagttttagtacctgatcttaatttttatcatatcataaccttgtccagattgaaagcatgggaaaaagaccgcggatgttgaagcggtctcttttttatctcgtctgcagactgttccttttaaaggcaaaatgattggtcgggccgtgtcccgctccgatgccgagtgtatgttccacggcttcccgcacaaaattgacagctgtctcaaacgcggtctgaatgtttttcccctttgccgtttctgccgtcagcgcggctgcgaacgtgcagcctgttccgtgggtgtgtttcgtgtcaatataagcgtggctgatttgggtaaaagacgaaccgtcaaataataaatcaacgattctcccctgttcaggctgatgtccgccttttatgatgacatgctttgccccaagcttgcaaaggcgttcggccgcttttttccggtcctcaaacgtgcggatttccatccccgtcaatacctcagcttccggaacattcggcgtcaccgcatagctgcgcggaattaacagctcttttaacgcggcctgagattcctcacgcagcagggaagcgcctcctttggcaatcatgacgggatcggtgatgagatgatcaagcccgtactgatccgttttttccgcaatttccgcaatcatttccgcgctccacagcattcctgtttttacagcatcaggccgcaaatcttccgccaccgcgtcaatctggctgcccagcgcctcccgggtgagcggataaatgccgtgaacgcccaacgtgttctgggcggttaccgctgtaagggctgacatcccgaaaacgccgagctcctgaaaggttttgagatccgcctgtataccggcgccgcctcctgaatctgatccggcaatcgtcaatgctttgcatatgctcatgatgtttttcgctcctttcacattatccgatccatttatgataaaaagatttcgctctgctgatatcacttgtgccgtgtattaatgctctgccgtcacgaaacagtaccatcttgaaattgtctgtgcaaaatgaaattaaatacgggttggctgaaacatcaagccctgcccgtctgagctgtcccgcaagattttgcagatcaaactgttcggaaatccccgttctgatctgcaccgtgttccgcccgcacagaaccgccgcttttgtctgattttcataggataaaaacggaaaatcgtttgtgccgcagcttgggcaatcagccgacttaagacgggcgacgtttatttctgaccgttcatttttccataaatcaaaggaacggagaacatgctcgatagatccgcccgttaacagcttcagcgcatctgctgcctgaaaaacggccgtctgcaatacagccgggctgatgattcccgccgtatcgcatgtcataccgcctaaaggcaatgtctcaagcagacagtgaaggcacggcgtgacaccgggaatgacggtaaaagagagcccgtagctgccgacacaggcgccgtacagaaagggaattcctttctgcacagccgcatcattcacaatcagcctcgtttcaaagttgtcggcggcatccacgatgagggaggcatcacgaatcaatccgggtgcgttttccgcagtgacatccatgacaaatccctcgacctctacatcgctatttatagaccgaagccgtttttcagccgccgcggctttcggcatttcctgtctgacatcgtcttcggtataaagctgctggcgctggagattactccactccacataatctctgtcagcgatcgttaccttcccgacccctgctctgacaagcatctccgcacttgccgtcccaagcgcacccgcgccgataatcacggcatgagacgaccggagcttctcttggccggtgggaccgatcggctgaaacagctcctgtctggaatatctgtccgtcataccggaagaccgtctcgcggactgcttgcagttccgtaatctttcaccggaattctcccggcttcataagaaagacggcccgcttctacggcaagcttcatcgccctggccattttgaccggatcatctgcgcctgacacagcggtatttaacagcacgccgtcagccccgagctccatcgcgtaggcggcgtcttttgaagatccgacgccggcatcgacaatgaccggcaccttcgcctgttcaatgataaaagaaagattcagcggatttaaaattccctgaccggaaccgatcggcgaagcgcccggcataatggcatgcaccccgagctcctcaagacgtcttgcgagcacgacatcatccgacgtatacggaagcacgataaatccctcttcgagcagctgttctgatgctttcagcgtttcaaccggatcaggcaaaagtgaccggctgcatccgatgacttctacttttatcatgtcacaaagccctgaagctttggcaagccttgcgattcggaccgcctcttcagccgttgcggcgccggccgtattcggcagaagcgtgtatttagacaaatcaagctgttcgagaaagttaggctgagactcttcaaagatgttcatccgccgcaccgcaaaggttaaaatatctgattccgagacggccaccgcctctttctgaatctcaaaactcggatattttcccgttcctaacagcaatcttgaccgaaactgttttccgcctattgttaacatcctcatccgcctcctacaaaatggacaatttctatgacatcgcggtcacacaaacttgtattttcataattctttttttcaatgatttctttatttctctccacaactacgattctttggtcaagctggtacgattcaagcaaatcctgaaccgtcccctcttttcgattccaatcaatttgttttccgttcagctgaaggatcatatatgaacagcctccttgcgatcgattcgaaacgcttcttcccattcctgtttaatctgtctttccatgatcatatcccgcaccatttcagccgttgccggcgccaacaggatgccgttccgaaaatggccggcggcgaagatgatgccgctgtcttcagggtgttgcccgataaacggcttgccgtctcttgttcccggcctgagccccgcccaaaaccggtctattttcatatgttcgatggcgggaagcatggttttcgcttttgcaatgacggcctcaattcctccgatgtcaggcgtatcgctccagtcgccctgtttcatcgtggcgccgatgacaagccggccgctttttctcgggacgacataacaatgatcatggtaaagggttttggtcagcggggtatcgtcattccacacggaaaggcattctcctttcacaggaaaaaaaggctgtcccaagccgagccggctgaaaaaccggccgctccatacaccgcttgcaactgcgactttgtcagcataaacatccccgccggacgttgtgatgcaatattctccgttcacccgttttacggaagtgacttgtgtgtgctcatatatgtcagcgccatagcgccgcgctccttttgcatacgctttgcaaacatagtacggttcgacatggacatcgtcttttataagacttgcgccgagaatgtcttttgaagcgtaaggctctttttcaagggcatcttccgctgaaagccaagtgacggaaggcagatcatccatcttccgtaaacgggcgatatcttcttcggtatacgccagtttaagcattccgccgttatggcgcctgatgtcaatgccgctagcttcctcaagctcttgccccgccgcttcatacagcctttgactgtgcatggcaaaattaaaaaacgcatcccggttttcacattccgcatgagcacccagcattcccgcggcagcgcttgtcgtttttcggccgacttctccggcttcaaacaagacaacgttctgctgcgtcttcgccagctcataagaaatggcacacccgataattccgccgccgatcaccgccgtatcatagtgctgcttcataatcggcctcccttaccgcacgtgcataccgttttgccgcctcctcgggattttcagctgagaaaatgcctgacatgacggcaattccgtccggcttcgcctgctttgtgtgtccgatcgtctgcagtgtcattccgccgattgcgataacggggatggaaagcgtgcgtttgatctctgaaagcaggctgatgcctcttgcttcaagtccttgtttacattcggtttcaaatatatggccgaacaccacataatccgcatcttccttttcagcttggatggcttcttccagcgaatgaaccgaacgtccgatatgaagatggggaaatctgcttcgcacctgctttacggaaaagctgcgggacggaagctgaacacggtgtatgttggcaaaaagcgcgatatccgccctgtcattgatgatcaatttgtccttatccgcaccgccctttttcaaaagggacaaaagctgcatgatctctcccgctgttttatcccgctcacggatatggataaagcttacttcgcgctgaatcgatagaatatcctcggccagctcggcaacgggtttgcgattatcagttaccgcgtgcagctccaaaggattccacctcttttccgtccttctcggaccagccttctttttgataagccattccccaaaattgatattcataatagcttgaaatcacaaaattctctttcattttcgcgcggatttcctctgtgctgttttcagcaatctcgtcaaaacggctgatctgttcttcgacctgctgtctgaaccagtctccgccgtatgtaccgatccatttttcataaatcggatgctccggtttgcactcttttaggtgttcgccgacttcataataaagccaataacaaggcagaagcgcagctaatatttctccaaaattgccgctcatcaccgacctgtacatatgagacgtataagaataggcggtcggtgccggtttaaatgctgcacgctcttcttccgtaattcctaaaagctccgtaaactcgcggtgcagcgccatttccgcttcatatgtcccttgagcgtggcccgccatcctgcccgtcgtaaacaagtcttcggcatatgcggcgccgaacgcctgaacttttgcaaaatgcgtcaaatagtaggaatcttgcagcacgtaatagctgaaacggtctatcggcaggcttccgtcaccgattcccgttacaaacggatgaacaaaacttccgtcccaccattcggcagccgcctgtctgcattcttcagaaaatgtcatcatgtcttcccccctgataaaataaaaaaaccactttcccgcatcggaaaagtggtttggaatttaaatggataaaaggaaccccaaaaaaataccgctccacttccctacgcaggtctgaacctgttcaagttatgagggtctaaaagtctcacttttatctcagcccttatgaaggacacccctagtggtcatacgattaatgatttatttgttatgccttctatattatcacgaattgcaatttggtcaagcttcaaggatttttctcagttctgacacgtagttgcgcgagcctgtgacgatgagacggtctcctgttttcagccgtgtgtctccgtgcggaacgatgctgtccacacctctgaaaatccggacgaaaatcacatcgcccatcagcggaaattcccgcagaatgatgccgttatacgccgggttttccagattgatctgatataacgaagactcctcattcgtcaggaggctcatcacgcccggcgcctcaattaacgcgcgcagcagcgtttttgtagacagaaggatagaaaaaatactgatgccctcttctttcagttttgtttcatgctcaaccgagccgacgcttgcgatgatacgctcagtccctttctctttcgctagtaaggcgatttcagcgttcacatcttcatttcccgtcgccacgacaagaatatccgttttgaaaataccgtgcgactcaagcgtgccgggctcgtaatcagaaatcgtgtcaaccgaaaaaacggattccgcaagcgtttccccggcattttcctgatacacatggacgacccgtacttcatattcctcctcaggcaattccagcgtaaccgggagcgtcatttggttggcgccgataaatgtaatgcgctttttttcctgcggcgcgctttgccgtttgaataatttcttaaagccgatcggcgtgatgatgctggcaataaccgcaactaaagtcagcgcgccggacatattggcgctgataatgtggagcctttctccgatcgtagccgccgcgataacaagcgacagcgtggacgtcagcaaaaagcccgaagcaaacacggttcttttgtcgtaccatttctttaaataaaacaccgggaacattttgctgataaacagcgcaagcagaagcagcggaatcatcgttaatgttttcggatcttggaaaagcgtccaaatatccaatttcaccccgaccatgacgaaaaagatcggaattaaaaacccgtagccgaaggaatccagctgttccaccatttctttattcggagacagaagcgataccagaacgcctgccaaaaacgcgccgagaatattttccgccccgagagattccgataaagcgacaagcacgataatcagtgtgaaaatggctctcgtgccgatctgcacagtgcctttagacatcgactgcacaaatgaacggtgtttaaagatcctgccgaagaaatacagcacgacccccgcggcaaagagaatcaacagaagccacatatttccgctgtcttctccgtaaagagaagagaagaaagcgagcagaatcattgtagccaagtctgcgataacggcgacaagcaggatgatctggccgatattggagttcatgatccgttcttcctttaaagtcgggaccaccacaccgagtgatattgttgaaataataagcgtcattaaaaatgcgttttgaataaaaccggctaatacaaaggcataggacagcagcaatgataaaataaagatgccgaaaaagataatcagcgcggcagaaaacgtgttgggcgcttccttgccgttcggaaggaattgttttttcttccctttctcaaatgaagaaaaatcaatttccaagccgcttaaaaacattaaaaagataaagccgagaacagacagcgtctccagccacgtgtctccctgaacgacaagattcaggccgctttttccgataataagccccatgatgatctccgcgacgacgacggggatgctgagcttaaaccgatgtaaaaggagcggcgtcaaaaaagcgacgatcagaacgacgactaaagatgcgactgatgtgtgttccatttgtaaatacctccttaaaacaagggttataaaagcccgctttaagcggacgaaaccttactttttttaaaaacataacgcatattctaacaaggcttaacgcgaaaaaaaagtgataaggctttatttcttcaattctttttttaatttgtaccaaaacagcgtaattaggtataggaattagccccataataaataaaaaaccgttaataaggaggctgacacgaatggcttatgacatcatcagcgatatacacggatgttatgacgaaatgatcgccttaatgcaaaagctcggatatgaagtgaaagacggaacgcccgtccattctgaaggcaggacgcttgtctttgcaggggatttaacggacagaggcccaaaatccgtagaagtgatgcgttttgtggcaaaagcatatgaaaaaggagccgtccgttatgtcccgggaaatcattgcaacaaactgtatcgttacttaaaaggaaaccctgtaaaagtgatgcacggactggaaacgacggcagccgaactgaaagagctgtctcccgccgacagaacggaagtctccggacaatttatccgattatatgagtcagcgccgctttatgacattttacataatggcgatctcgttgtcgcccacgccggcataaaagctgacgatatcggtaaatactcgcgtaaggtaaaagaatttgttctgtacggcgatattacgggtgaaacgcatcccgacggcagacccgtcagaagagactgggctgccgactatgaaggcaaggcgtgggttgtgtacggccataccccggtaaaacgcccccggatcgtcaaccgtacggtcaacattgatacaggctgtgtcttcggcaatcagctgacaggctttcgttttcccgagcatgaaaccgtctctgtggaaagctctatgccgtatgatgcttcacgatttcgcgaggatcacggcaggcaggcatgaaataaagcccgaaaccggcaaacggttcgggctttacatgtgttcaattaatgttttcatatcgtcaggcaccggagcgtgaaaaacgagcgtttctccggtcatggggtgtacgaatgaaagccgctcactgtgaagagcctgccgggcaattccctcattttttccgccgtacaatgtatcaccgactaacggatggccgaggtagctcatgtgcacccggatttgatgcgtccgccccgtttccagccgcagggctgcaagcgtaaacgcatgtcccgctttttccgtttgaaaatgcgtcaccgctcgttgtccatccggcgttaccatccgctcaataatactgtcgtgttttcttccgatgggcgcgtccaccgttccttccttctgcagcatgatcccgtgtacgacagcgagatatcgcctgctgacaagcccctttttctgtgctgccgacaaaagagaatgggaaagccgatgtttggcgatgagcatcgcccccgatgtgtccctgtcaaggcgggtgacaagatgaaccgttgattgcacgccgctttttcggtagtggctgatcactccgttagcgatgctttttgacgggtgttctcttgatggaattgaggagacatacggctgtttattgaccacaagcacatggtcatcttcataaagaatatcaagcggaaccggctcaggcaaaagcgtttcactcacatgctccttcggaaattcaatcttaagcacgtctccctccgctaacacggtgcggacggttacatgctctccgttcacaagcaggtctcccccgccgaatttaatgtcagcgagaagccgctttgaaatgccgagctgcgccgtatattctttaaccgtcatgccggcatcccgggcagtcatgttcttttggataaaaaagttgtccaatccgtttcctctttctattcgccttttccgataaaggaatcctgcacccttttccaaaacggaaaagggcggaatcttgcaaatctgactttttcatttgccacacggcatagaatggacttgacatccttatgcagcaaggttaaatgatcaattgtgacttgaaagtcgacgtcgtttctcggtttgatgacacagttatgatgatcgggaagcaaaagcggcgagccgacagtcctgaacactctgttgttgatagatgccatttcggcaagctgaatcgccctgatggaagggtggatgattgcaccgcctaacgccttattataagccgtgcttccggaaggcgtggacagacataaaccgtctcccctgaacgtttcaaacagctggcctttaatttccacgtcagcgacgagactgccttctatgcttttgatcgtacattcgttcaaagccagataccgctcctcacgctcttcatcatgataagtgacaatcacctcaagaaggggatactccacggtatgatacggcgttttggcaatggccagaacgagcttttctatctcctgcggaacccaatcggcataaaaacccaaatgccccgtgtgaactccgacaaaagccgttttatcaagacggtcgctgtacctgtgaaatgcgtaaagaagcgttccgtcaccgccgacggaaataacgatttccggctctttttcatccaaggtcatatcaaaatcgagtaaatacgcctgtattttgcttttcagtgtatctgaaacctcgtctccttttgaagaaacggcaaatttcatgccattcccctcctttccttcctactggcggtctcccgcttttttctttcgcgagaacgcggcttgggcttcctggatttctccgcggatttctgacatttcttcatcgagccgggatgcggcttctgaggcccgctgcagcctcagctttactttttcgggaatgttcccgctgtatttgtaattcagtgaatgctcaatggttgcccaaaagttcatggcaagcgtccgaatctgtatctccacaagaacgtgcttttcaccggacgttgtttgtaaaggatataaaacgacaaggtggtaagaccgatatccgctttccttatgctctgctatgtaatcccgcttatcgacaacggtaaaatcttttctggcaaacagcatatttttgacgatctggatatcatcgacaaattggcacataatacgcagccccgcgatatcctgcatcgtttcaatctgatgaagcggtatgctttttcgtctcgctttttcaagtatgctcgccaccggcttcacgcggcctgtcacaaactcaatcggtgagtggtcatcttcatactcataaagggttctgacgcctttcagcttcacctttaattcttcaacagcctggcggtatggcgctagaaattgctcccattgtttgtcatccatcgtacatcccccaattccgaacctgttctaaagaaatacgtttttcactttttcttccatatctccgtagtttgcattatctttaatattttcaagaagataatcgagttcttcatgcagccctgaaagttcaaccgttttcgcgccggcctcaaggaccgccggttttccttggtctaaggcttctttcagatccggccagacatgttcttttataatgacatattcaaaagagtcagctgattcaagtatgtatacaaaagcaaagtgatcggaatcaacaagcatttgacctgaggctttgcgttccgctccgcttaagtcttctccgcacttcaagcggagcgcgtcttctgttaatgatgcattctggatttcaattctcttttgcataatgttctccttttttaacaaagtacagcatttattttatcatatcaaggtcgatattgataaacgtaacctctaaagagataatgggaattatacaatttttcgtcctgaaaggaagactgtcatgacccaagaaatagaaattgaattcaaaaacctgctgacaaaatcagaatttctgaagctgagtgaagcactctgcatgaaagaatatgattttaaacagcaggtcaatcattatttcgacacgaaagatttttccctgaaacaaaaaaaatcagcactccgcatccgagaaaaagacggctcgttcgttctgactttaaaagaacctgccgcggtcggtctgctggaaacgcaccaacagcttgcggcggcaccggatcttgacgtcttcaagattccggatggccccgtcaaacggcagctggacggtctcggaatccgttcagaacacatttgctgcttcggaacgctgtcgaccgcacgcgcggaaaaagaatcagaaaaaggcttaatcattttagatcacagccgatatttagagaaagaagactttgaattggaattcgaggctgctgactgggatgaaggaaaacaggcgtttgaacaattgctcaagcaattcggcatcccagagcggatcacgaaaaataaaatccagcgtttttatgaacagaaacaaaaaaaggtggaatgacacagtgaatataacgaattgggcggcccttctccagctgcagtcaatggcgctgcaatcaatctctcatacaagcacggattcaggcggacaatcttcagaaagcccgcttgccaatttcagcgcgctgctcagccagtatacggacacagccgtccggcagcagccggaatcagggattttaaacggtgtgcggaccgctcacgcttcatattcaccgagaattccggtttcatccggttccgcggcagcttcacagaccgtttccccgagcataaagtctccgaatgcggcttctgacatcagcaccggaaacttttcaatagacagcgccattcagaaagcagccgaaaaatacggagtggacgaaaaactgatccgcgcggttattaaacaggaatcaggctttaatccgaaagcggtcagcggtgcgggggcaatggggctgatgcagctcatgccttccacggcagaatcactcggggtgtcaaacccgcttgatcccgtccagaacgctgagggcggcacaaagtacttaaagcagatgctcacgaaatacgacggaaatgtatctctcgcgttagccgcctacaacgcaggccccggcaacgtagatcggtacggaggcatcccgccgtttaaggaaacacagcaatatgtcaaaaacataacccggcagtattacgcgtaaaccagagaggcttccttcgccctctggtttttttgcggagtgaaatcttacacatgaatgaaggcgatgtgatatgatatgaaatacaagcgcctgacagaaaggcactttgtttgtagaaataaaatgttattgctaaaatatacagtaactgaagatagtaaaactgaaagataaattcgcaatgggaattatgattcctattagccatataaaggagtagtcaacatgggacaatcgtttaacgcaccatatgaagcgattggagaggaacttctatcgcaacttgttgatactttttatgagcgtgtctcgtctcatcccttgctgaagccgatatttccaagtgatttgactgaaacggccagaaaacaaaagcaatttttaacccagtatttgggcggacctcctctttatactgaagagcacggacatcccatgctcagggcaaggcatctcccctttccgattacggatgagagggctgatgcgtggctaagctgtatgagcaaagcgatggatcaggtcgggctggagggcgatattcgtgaatttctgtacgggcgtctggaactgacggccaggcatatggtaaaccagtcagaagcggaggatcgatcatattgacgaattatcagcatgagcaatacttcgcccattgccacggacatccaaaaaaaccgctcgaaatttacatgtttgtcgaccctttatgtcctgaatgctggtcgctggagcccgccataaaaaaattaaaaatcaaatacggacgttttttcaccctgcggatcattgtttccgcgagcattacatcgctgaataagcaaaagcggaaaaaacaccttcttgccgaagcttgggaaaaaattgcgaaccgttccgggatgccctgtgacggaagcctttggcttgagcaggatcagcctcttgcatcgccctaccttgccgcactcgctttaaaagcggccgaactgcagggaagaaaagcgggcattctgtttctccgcagcatgcaggaaagcctgtttgtctccaagcagaatattacggatgaagacgttcttttagaaattgctgaaaagacgaaattggatgttgaagaattcaagcgcgacctccattcgcaaagcgcggtaaaagcgcttcagtgcgatatgaaaatcgcggcggaaatggacgtcaccgtcaacccgacattgacgttctttaacagcctgcatgatgatgaagggctgaaggttcccggcaactattcttatgacgtatacgaagagatcttattcgaaatgctcggggatgaaccgaagccttctgaaacgccgcctttggaatgtttcattgaatatttccggtttgtcgcatcgaaagaaatcgcactcgtttatgatttgagtctagaagaagttgaaaaagaaatgaaaaaactggcattcgccaaaaaggtcgccagagtggaagcaaagcacggtctgttttggaaatctctggccggaacccaggaggatgtcacctgttgtgaccattaaaaaaagctgattccttacggagccggctttttttgtgcaaataaagaaaccgcgccgggataagcgcggtttcatatgtcttaacgacaacaaaggggatgggagaaatttttcacggtcaaacaaaggggtaatgtttgtttgtgatcaatttcacatccttatcatatcaaatcttgtcgagttttgacaagccataagattaatgttcatatttttgtcacaaaacataactgactgcttgttttcatagaatatatcaatcataaacaaggagggaaatcaatgctccgcaccgtattgatcatcggaatgattgtgtttttcttctttttaaacctgctggccatgatgcacatgctgccgatttacattacatctccactgctgtttctgtccatattgtttgccctgtaccggctgaatcaccgaaaaacgtttaaggggttttagaaaaagcctgcgcatttaatgcacaggcttttttgaattacgaagggttcactttcgaaagaagctcttccatttcgttcagtttctcttcaaacattttgcaggccgcctcgatcggttcaggcgatgtcatatcgactcccgcttttttcagtatgtcgatcggatattccgagcttcccgcttttaagaattcggtatagcgctccaccgcaggcttgccttcttttaagatctggctgctcagcgcttgggccgcactgtagcctgtcgcatattgatacacataataattgtaatagaaatgcggaattcttgaccattccagactgatttctttatcaatcaccatgttgtcaccgaaatactttttattcagatcataataaagttcgttcagcagttcaggcgttagcggctcgccttcctgcgctttcgtatgaatcagatgctcaaattcagcgaacatcgtctgtctgaacactgtgcctctgaatccttcaagcatgtggttgagcaggtacagacgctgtttttcatcctttaagctgttcagcatatattcaccgagcagcgcttcattagtcgttgaagcgacttcagcgacaaaaatgctgtagttaccgtacggatacggctgatattttctcgtatagtagctgtgcacggaatggccgaactcgtgaacgagcgtaaacagattattgacattatcatgccagttcatcaagatgtacggattcgtgccgtatgtaccggacgaataagcaccgctgcgttttcctttgttttcgtatacatcgacccagcggttttcaagtccttcttttaaaatagacgcgtattcctcgcccagcggagcaagtcctttgagcatataatctttcgcttcctcatatgttaccttcattcccgaatcttttacaagcggtgtgtacaggtcataaatatggacttcatcaaggccgagcacctttttccgcaggtcaatgtaacggtgtaataacggaagatgtttattgatcgttttgataaggttatcgtaaacctcttcaggaatgctgttattggataaagccgcttcccgtgctgatttatactttttcacacgggcgtaaaaattatctttttttacagtgccgctgagtgtagtcgccatcgtgtttttatactgtccgtatgttttatatacggcttcaaatgcgtttttgcggacttcacgattgctgctttccaggaaattaataaagttgccgtgtgtgatttgagtttccttgccgttttcatctttaatcgacggaaacgtaatatcggcgttatttaaaacactgaatgtattggaaggcgaagacagcgcttcagaggcttccgcaagcagggcctcttcttgttcgctcagcacgtgcggacgctgttttgtaatttcttcaattgcatgggagtaaagcttaagctcctctttttcaagaataaactggtgcagcttgtcctcctgaatcgccagaatttccggttcaatgtaagcagtcgcgctggcagcctgagaatacaggcttgcggctttgtcgttcagcccttggtagaaagaatttcccgtatcctggtctgagcgcatatgtgcgtatgcataaagtttcccaaggcggttcgtcacttcatcctgtgccgtaagcgccgcgtataaattatcagccgaatgagcaagcgtgcctttaaatgaagataaattcggaattaattctttaactgcttgaaattctttattccaggcctcatcactaggaaaaatatcctctagtctccatgtatgctctgcctttacttcacttctctcaggcagctgtgctgctttattttcctcagtcatggtgatccccctcgttttctttacttcaagccaattgaaaaaacgattgtttctccaaaaacttgtgttgtgattatcttccggcttttcactgccttttgtcaaatcatatgcggcatataagaccgagcataccaataatacagtgaaaaaacgaaaacaaaatgcttgtacgcccctcacattcgccaccaccttgacgttagggtgaacgaaatgaagcattctcattccccaaaaaagagcaggtcccgccggcgcagctcttctgccgtttgagggcgcttctgttgagatgagggcatatatacttcattctcaatttcccttaaaaaatcctgcaagcataagaaatcagcatattgttttaccgccattccgataaggctgtcttgtgaaccataccgcatccggatctccttatgcctgattttttgccgtaaatcatgaaccatgccggataatcggatcggcgcgccttttttagaaagttccgcaagccgcaagtataaatggccctgccacacaaaaacgggacttgcaaacacaaagcctgctgaaacgggaataaacacttcagaggggagaaatggaaatgcaacctgatgtctttcgtaaaaaagacgccggataagaccggcatcttcagataaaaaccgcccgcctttgttgcggaagccggtaacggcacgcccccacgaggaaagtctgacgctgcgccgcccttccggatgacaaatgtctttcagatttgctttgtgaagagggattgcggttaagccggcataagaatagccggtgtaaaacggagtgatggaatgcagcctgtaaaaggagcgggcgtcggggcagtaaaacattaaggaggaaaatgaattgacttcaaagaactgccagtgaaaagcagaaagccggaaaaattgcgcggtcatccgttttaaccgttttgccccaatgatccagaccggccggtacccggcgtttttcaggcctgccgtccggctctttaaagagtccgccgaaaggttcgcacattgaaattcaaaagccagcctttcttctccgctttctgccgtcaagtcaggccgctgtccagcggaagtcagatacggttccaggctgacactgcacccttgtgtcttcagccagagaaaaagctgtctttttccttccagatggtattcgctttcaggttcggattccccgggacacagcctgctttttttatgagcgaagtgcggcagtttttcgcgtcccagtttgatatcaagctcacttttgcaaacggggcagaaccagcgtttctttctcagctccgccgctttttcctttgaatagcttccggccagctgaatgagccgtccgccggcagtcactgcactgaacatgttgcatcttctcctttcctgaatcttgttgtattcagcaggaagaaggcataatcctgtttgcggatgagagccgttatacggttttcagccgttcatcctgtcattcagaacaaaaaaaaccgatttctgctgagagaaatcggttttttatgatgcaaagtgtttttttattgtatataacgcatgatcagcgatcactaatttgccgtattcttcaagacggtgaatgctgactgatgattcgtgcgcgtactccaacaggatgcttagctgattttcaacctcttcatcagtttgctcataaaaatctgcatataaataatatcggtcttcaaacgaatacagggtcgttttgattccgttaagattcaattttgatagcgagatgagatcctcaaaatcatcgaaccgcaaagtgaactgaagcttttgctccttatcttcccggctctcggcctgctcttctttctggaaatcatcaagtaaagcatcgagattttcatctgccggctcttgttttttatcttccgggatcggcagttcgagtttttgtccgtccttggaaagctgggcttttgttacgattatttccagtcctttgtccaatgcctgaacctgaatccaaagaggaccctcgacagcgaattcctcttcatcatgcacttcatccatgacttcccagaacagttcttcactgcgctcgcgattgtaccagatttcttctctgtcaaaaccgcgatcttcaatatcaccataagacatataaaattttacagtatgctcattaattctttctatttccattttgccaaccttcccttctttataagatgttgaagggacatctaagctcccgatgaatagtactttactacactttacccattccgtccacatcttaaccttatagaagacagcgcaaattctttatatttctattttatgataaaacagttataaaagaaataaaaaagcattttcacaccgaaaaacaggctttctcccggttcccatcataaatagcgcactgcttcatatattagctgtacaagcaatcgatctataagcgaggtgttaccatgccgcacgattacctgctgtcccttctgcttattatcgggattgaccttattctcggcggtgacaatgccgtcgtcatcgcgatggccagccggaatctggcccataaacaaagacagcaagcgatcatcttcggaacatttatcgcagtcgtcttgagaatcgttctgacgagcgctgcggtctatttattgaatgttccttttttacaatgcgcaggcggggtatttttattgtatctcggctatcagcttctgattgagaagaaagatgcgcagcatgtgaaaagcagttcttctctttggaaagccatccgcacaatcgttctggctgatatctttatgtcgcttgacaatgtcatcgcagtagccggcgcttctcacggtgagctgacactagtagtgatcggtctcttcatctcggtgccgattattatttggggcagcaagctcgttcatgccgccatggaaaaaatgcctttattgatgtatgccgggagcggtcttctcgcatttaccggcggtgaaatgattgccggagacagcaagctgtcatttttcatggcagaacacggcatgatacagatgatgctgccgattttgaccgttgtttttgttatcctcgccagtatgatttaccagcagactgaaaaataacaaaaagcccaaaccgcgatggttttgggctttttccatgcttatcgtaagcttatatcagttggcaagacgctgtgcttctcttaattggaaagaacgcacttttcttggcaggaatcgtctgatttcatcttcgttatagccgacttgcagacgtttttcatcaatgatgatcggacggcggagcagtcccggatgctcattgatcaaagtatataagtcttgaagcggcatagattcaacatttacgttcagtttctggaatactttagaacgggtagagataatttcatccgtaccgtcttcagtcatacgcagaatctgcttgatctcatcaattgataacggctcggagaaaatgtttctttctacaaacggaatctcgtgctcttcaagccaagctcttgcttttctgcatgacgtacagctaggtgatgtgtataatgtaaccattaatcttcactcctctaattagtaggatgaacatgtttgtattctcaaattgaaatgactttaaaaaaggaatctttataggtattatactataaaaaagtaagtgtgaacagtctcctgagaaaaaaatgtgtcaatccggcaaatttacggctggaggatttttccccattctcaattagctcagctgatcgaaaatgtttttttgttttttctcatcaatgactttgagaacttcatccgttttctcgtatgattctccgtaccatttttcatctttataagtgtgaatgttttcatatgtctgtttcatcgcttcaaatatttcttcttctgattccgtcttaggtgaccagtacagaatctccattttgttcacttcattcgtagccaatgaccggcgccgatacccgattgactgcgcgtgcttgaaatgctctctttgataaaaacgcaagcgtttctgtgtatccgtgtcatcctcgtcaacaggctccacctcaagcagaatcggcttgttcttctttttcagtctgccgatcagcttgcttccgaggccttgtcctctggatttctttgacacaaacaggtaatcaataaagatgaaagagtcaaattccgcatacatcagcacgtggtactgcccctcttctttatgataaacatcgctttgctcctttaacagagcttccatatgcgcttttgatttcatttcttcaatcggaaaatattcactcagcttttcgtaccagttcattcatttgctccttatgggttcgttgtcttcacacttttagatataccccatttccgattgtttaaacaatcttacatctattaagacgtgtgatcctttaacatggtttcaatttttttaaaatggtgtgtaatcgacgtttttggtataacggtttgccgcgtcccacaataaaaattcgtcaattccttcatcatgcagcgctttaacctggtcctccacctggcgtttcccgtacttttgataatttccgctgccgagatatgatgccgtgaagtcctgaagccacggacgcgatacaggcgggtgtttcagcttggacagctttttattttccaccttcgcgtattctttgacgacattgtagggctcaagatccggtttatcaatgccgaaatagcttgtccaatggctcggataaatcatggatgaaatgacatcgacctggtctgaaattttgctgaaattctggccgataccaggcgcttccggcagcgtggctgaatagccgaaaatatcaaccgacacatccgcgccgtacggcttgagttttttcttcgcataaccgacaaaatcggtgacggcgtgaacgcgtttttgcacattgctgtctgctgtttttccgtaatcgccgtgtccgtatgtcagttcgtcatcacgtttttcaaacccttcaggaaaacggacataatcaaactgaatttcttgaaaacccatctttacggcttgttttgcaatctttacattgtaatcccatacttctttcataaacggattgacgaacgattcgccgcggccgtttttccagacacttccgtttttttctttaaaggaccactcgggctttttattcgcgagttcgctgtctttaaatacgacaatacgcgcgatcggatagatctttttttcctccagctttttcatcatcttttttgggtctttgatgtacggcttggcgattttggcatactcagaatggccgtccggcttaaaggtgaggttcccgttgtcgtccttgacatcaatcaccattgtattgagctccgttttgtccacaaagtctgtcagctccccgaatttgcttcctcccgctgaatgtcctgtgacgtaaatgccccgcaccttatcaggatgtgaaaaatgcagccctgacggataagcgaaccgtgcatttgatttcggcaattctttttcagccagtgctacttttacaagcggctgctcctctttcacagcggcatgggccggataagcggctgcactgataaacagtcccgcacaaatggcgcacaaaatggttttcatactgatctccccctttttttccattatagaaaaacgggagcaggcttaataaacttgaatgtgcgcaaaaaaatcctccaagactcagtcttggaggatgatacgtttatagataggttttaaattcagcttctgtgcacatgacaaaatgtcccggtttcacttctctgaattccattttttctccttcttggagctgatgaactgccggatcgtatttctttcgcgtgcgatttctttcatagtccggatcaggaagcgggatagcggacagcaatgatttcgtatatgggtgaagcgggttttcgtaaagctcatccgccggcgcaagctccaccaattttccgaaatacatgacgccgatgcggtcgctgatgtatttgaccattgataaatcatgggcgataaacaggtaagtaagccctttttctttctgcaattctttcattaaattgacgacttgcgcctgaatggagacatcaagcgccgaaatcggttcgtccgcgatgataaactccggatcaaccgccagcgctctggcgattccgatacgctggcgctgtccgcctgaaaattcatgcgggtagcggttggcgtgctctttatttaaaccgaccgtttccagcagttcgtgaacccgctgcatccgctcttttttcgtttttgccaggcggtgaatatctattccctcggcaataatgtcggcgactgtcattctcggatttaaagatgcgtacggatcctggaaaatcatctgcattttccggttaaactccagcagcttcttgcgggattttttcccgtggacattttccccgttaaagagaacttccccgccggttgcctcatacagccggataatactgcggcccgtcgttgatttaccgcagcccgattctccgacaaggccgagcgtttcgcctttataaatatcaaatgacaaatcatctacggcttttaccgttcctttctgcgtgaaaaaatgctgttttaagtgtttgatttcgagaagtttctcagtcatttttttcaccttccttcattaaaacaggatgctgatacgtattcggaagctgacggattttagccttcaccgcttcaggcggctcgaccttaggcgcatcaggatgcagaagccacgatttcacaaaatgcgtatcagacactttatacatcggcggttcctgttcaaagtcaattttcatcgcatatgagctgcggagcgcaaatgcatcccctttcggaggattcgtcagatcaggcggcgtacccgggatggccgtcagtttttcctgatcggtgctgtccagactcggcattgaggcaagcagcccccacgtatacggatggcgcggatcataaaagatttcatccaccgtgcccgattcgacgacctgacccgcgtacatgacggcgacccggtcggcgacattggcgacaacgccgagatcatgcgtgataaaaatgatagacgtatcaattttcttttgcagatctttcatcagctcaaggatctgtgcctgaatcgtcacatcaagcgctgttgtcggttcatcggcaattaacagtttcggatttgccgcaagcgccatcgcgatgacgacacgctgtctcataccgcctgaaaattcatgggggaattggccgatccgtttttcgggcatcggaattccgacgagatcaagcagctctatggcgcgctttttcgccgcttcacttgagattttttcatgtttgaaaagcacttccgtaatttgcttgccgactctcatcgtcgggttcagagaggtcatcggatcttggaaaatcattccgatgtcctttcctctgatggcctgcatttctttttcggacatcggcacgatatcgcgtccgtcaaaaagaatctgtcctcttttaaagtagcccggcggcatcggaatcagcttcataatcgcttgggaggtcacactttttccggaacccgactcccccacgatcgccagcgtctctcctttattcaaatggaaattgacgccgcggattgcctgtacctctccgccgtatgttttaaatgaaatggctaagtcttttacttctagcaaacgtgtcactcatatcactccttatttgcgtaacttaggatccagcgcgtctcttaacccgtcgccgacaacgttaaagccgaacatcgccaggcagataaagccggcagggaagaacagacgccaagggtaataggttaatgcaggcaatccgtctgaggccatcgttccccagctcgcaagcggcgcaggtacgccgaggcccaaataacttaaaaacgcttctgtaaaaatcgccgtcggaaccgtcagtgtcatcgttacgagtatagagcccatcgcgttcgggacgatatgcttaaacaaaagccggccggttttggcaccgagtgtctgtgaagcaagcacatactcctgattctttaattgcagcacctgtccgcggacgatcctcgccatattgatccagcccgtgatcgtcatggcgacgataatggtgagcaatcctttcggcaggacaaccatcagcaaaataaccattaataatgaaggaacagcccacagaatgtcggcgatgcgcatcatcacttcatctgtgcgtccgccgcggaatccggaaatgctgccccagattacgccgatcaataaatcaagcacggcagctgcgacaccgataaagatggaaatccgcgcgcccacccatgtccggacgaatatatcccttccaaggtcatccgtgccgaaccaatgatctttcgacggcgctttatccgcatttaatagattggtagtggcataatcataccttgaaaagataggcgcaaaaatcgccatcagaataataagaacgatcagtacgaacccgaccatcgcaagcttattgctgcggaagcggagcatggcgtctttccagagggaaaggctttttttatttattttttcggcatcgccggcattagctgaagctggttcaaacatatttttaggaatgttctgcatggtctaggctcctttctttgctttggaaagcttgattctcggatcgattaatccgtacagcacgtctacaattaatacgcatagaagcaggagcacgctgaagaacacggtaactcccataatgaccgtataatcacggtttgtaatgctgtttacaaaatgcgcgcctaaaccgggaattccgaaaatggattcaatgatgaaacttcccgttaaaatggatgccgccatcggccccatatatgtcacgaccggcaaaagcgcgtttcgcagcgcatggcgcacggtgactgacggacgggacagtcctttagcttttgcagtccgtatgtaatcgctgtttaacacttcaatcatgcttgaacgggagagtctggcaatgaacgccatcggcatggaagcgagcgcaatggagggcagaaaggtgtatgcccaggattcccatcctgcgaccgggaacagttctaatttaattgagaaaatatattgcaaaatcgtcgccaatataaagctcggaactgagatcccaaagatcgttaaaatcgcaatggtataatcctgccatttattatggtacagggcagcaagcaccccgaaaagcacaccgaacgctaaagcgaggagaatagcttctgcaccgagagtgaatgagacggggaagcctgaattgattaaatcattaacactttggcctttatatttaaaagaaggcccgaagtcccacatcgccacagattttaagtagctgacatattgaacgaaaagaggcttgtccaaaccatagtgttcgtttaagtttgcctcaatttcaggcggcagctttctttcgccggaaaatggtccgcccggcgctgcctgcattaagaagaacgtggcggtcacaatcacaaacaatgtgatgatcatgtaaatgaatcgtttaccgatatatttcagcaaggtgaacacctccatgttttttacaattttatacgtaatcagtaagaaaggtatatggggacatcctccccatataccttgggtcttttgttttcagaaccggcttttattcaaaagaagcgtttctgaagtaaacttcgcctgttcctgtcaagatcacatttttgaggtttttatcctgcacccaaggatccgtatagaaataaactggcgcgaccggcattgcgtcgataaagatcttttctgcttttttcagctcttcgatacgtttatccggatccgtttcaagctgagattggttcagcagctttttaaactcaggatcttcccacccggtatcattgtttccgccttctttatcacggaacaattcaaggaagttgatcggatcgttgaaatcgccgagccagcccatacgtccgatttggtagttttggctgtgcagcttgtcgatgtaaacattccattcggagttatcaagttcaactttgacgcccaagttctttttccacatttcctgtacggcctgcgcgattttcgcatgcgcgtcatccgtattgtaggacagcttgatcgccggaaggtcagaggcactcttgacgcctaattccttcagtcctttatttaagaattctttagctgatttgacgtcattgtctttgaagtaaccttttgtgttatccttgaatcccttcattgacggcggcaccgcagccatggccgggatttgttcgccctgcgttacatttttcacgatggacgagcggtcgatcgcataagcaagggctttacggatgttaacattgttcagcggtttcgcttctgtgttgaatttgtaccaatacacgcctgcgatcggttcaacgtgaagagatccgtcttttttcaatgtcggcagagattcagtcggaagctggccgagcggcattcctgcccagtcaagctcaccggcctggaattttttcagttcggtgttgttattgttaatcatcaccatgttgattttcttcaatttcacagcgtctttatcccaatattgatcgttcttttcgagcgtgatggaaccgctgtgtttccaggccgtcattttgaacgggccgtttgacacataattttcgcccgcgtttgtgttccagtttttatgtttttcggcgattttcttgttgatcggcatatacgtatagaatgaagttaattgcgtgaaataaggtgtcgggttattcagttcaacctttaatgttttgtcatttacggcttttacgcctacatcatcaatcttgccttttcctgtattggcagcttcagcgcctttgatgtagtagagctgataagcgtattgtgattcgttgttcgggtcaagcacccatttccatgcatattcaaaatcctgcgccgtcacagggtcgccgttagaccatttcgcaccgtcacgaatcgtaaatgtataggtctttccgtctttgcttgtttcaattttagatgccattccttcttcagggtcacctttggagtttacgcgtgtcaatccttcaaaagtctgtcggattacgcctcctgaaacggaatcattcgctaaacccggatgcaatgagaacggctcggttttaatattgatattaagtgaagtctgtcctttggtgtcttttttgccgccgcctgatccgccgctgaatccgccgcacgcacttaatacaagcgagaagataagcatcaaacctacaatagaccaacgctttttcatgcactaaccccctaatcaaatttttcagcctttactactaaatactcagaaatatcagacaaaataacttaatatttttctaaactttaattgtgttccgtcttttctgattattttatgtaaagaagctgtaacaatagagtgaacaagttcattataatgaaatgaataatttattgcaatactattttctcaatttaaaatatttaaatttggtcagtttttctgtcaaaaaggtgatacacttctatagtttaaagcatgacctaactaaatttttttaatgtaatttccagttcatattgctttttacatataatattcgttatacgaaatgttgatatacgttatcatttaagctttttcagttctttttgaggatttccacccctaaagtaaactggaaataagcttgtattcctctgatgacatttggctataattgatttataatagatcaatcaaatacatttgttgtgattgcgatgatgaagagtagtacacattttcatccgtttgaagagagtctgcggtgctgggagcaggtaacgggcgatgtggaatggacttctgagcagctgaccgaacgttagtaggcccagccggagcagcctccgttaccaacgtctcgagcgattccattgtaatggaataatcagggtggcaccacggttcattcgtcccttttttctacgggaagaatgggctttttttattatgttttaagaaatgaggtaagaactatgaagaaaacgattttttcaggcattcagccgagcggttccgttaccctcggcaactacatcggcgcaatgaagcaatttgttgatttgcagcatgactacaacggctacttctgtattgtcgatcagcatgcgattacagttccgcaggatcggcttgagctgcggaagaacatccgcaatctcgcggctctttatctggccgtcggacttgatcccgagaaagcgaccctctttatccagtcggaagttcccgctcatgcccaggcggggtggatgctccaatgcgtcgcatatatcggcgagcttgagcggatgactcaatttaaggataagtcaaagggcaaagaagccgtcgtgtccggactgttaacctatccgccgctgatggccggcgatattttactgtacggaacggatcttgttccggtcggagaagaccaaaaacagcatcttgaactgacccgcaacctggcggaacgctttaataaaaaatacaatgacatcttcacgattcctgaggtgaaaattcctgaatcaggcgcgcgcatcatgtcactggctgatccgctcaaaaaaatgagcaaatcagatccgaaccaaaaggcattcatcacgctgcttgatgagccgaagcagctcgagaagaaaatcaagagtgccgtgactgattctgaaggcattgtaaagtatgataaagaaaacaaaccgggcgtttctaatcttttgacgatttattctattttaggaaacacatcaattgaagaattagaagctaaatatgaaggcaaagggtacggtgaattcaaaagcgatttagccgaagtcgttatcggcgcattgacaccgatccaagagcgctatcgtgaattaattgagagcgacgagcttgaccgcattctcgacgaaggggcggcgcgcgcaaacaaaacggccggcaaaatggtgaagaaaatggaaaacgccatgggtctcggacggaaaagaagataaaaaaaagaggcgggagaatccccgcctctttttttagttcacttttgattcctgttccatttcccaaagcttttcgaaaaacggctgccctttaatcaaattttcacagaacgcaagatgtttatccgaccagccttcaattgtttcattgtaaagcatgtcccagatctcttcaaaactcatccgtttgatctgctcatacatatgcggattccattccgtgtaccaatacacaatttccgcacggtttttcagccctttcagctggtcgagcgccataaacatcagctgcttgatctgccgctcttttctcgtcagacctctgacatgccccggcgccaatgacaaaatgtgatattcctttgaagactccaattgcgacggctcaaattgaaacgattccggttctacatcctttaccatttcataaacaagctgctcctgtctcggaatcaggcggctctttctgaccggaatggtatacccgatcgtatccacggcaatgatgccgatcccgtctgtcacgacaaaacagtactccagctttgtccgctcatgattttttcgcacgtatgacttctggtggacttggtcaagcagctctttcggaagctctgataagtcgttttctatgtaatgaaataatactgacggcactctgagcagcggcgtctgatccaaaagctcaaccgtgtcttccttccgccattcgtgaaaatggcatacattgtagccgttttcttccccttcaaaccaattgacccatacatcatgaagaaataacatattcgacccctcactttataaaaactgttgtccacagtataggcaagggatagataaattattccatttcaatatgagatttccgttttacggagctggatttccgactgcattgcaacaaaaaaatctcccgttcgtccgggagatcatttcacatttttcggatcaagcgcatcacgcagcccgtctccgacaaagttgaagcacaatacggtaagaaggatcaacaaacccgggaataacgggtaccaccaagcctgtatcataagcgtaaagttctgtgcatcctgaagcatattgccccagcttgcgatcggcggctgaatcccgaaaccgagataacttaatgtagattccgccaaaataaccgttcccacctttaatgtggctgagacgataatcggtccgagcgcattcggcagtatatgagaaaagatgatgtgatggttttttgtaccgatcgtctttgcagctaatacaaactctctggaacgaagcgataaaaactctcctcggacaaggcgtgccgttgttgtccagcctgtaagggagaaaattaaaattaatttatccattccgggctgaaaaatcgtaacaagtgtaattaacaaaaatatatcaggtatggataatacgatatcaacggttctcatgagaacggcatcgacaaaccctttaaaatatccggcaacggctccgacaactgtcccgattgtaatcgcgccgatcacagaagcgaatccgacaagcaaggagacgcgcgccccgtacagaaccctcgtaaagatgtctcttccgaatttatcagttcccattagatgttttaagctcggcggcttcaaacgattgatgagagattgactctccggagagtaaggagcgattaccgaagcgaataaagctgacaagataatgatggttaatataacggctccgattacagctagtttattttgaaagaacttttcgaaaaaaatcttcgtcattgtttccggtttggattgaatattttcctttaatttcacttcgctggggggtgtgccggtatttggctgtaacatttgacctctcacctctctttgttaatattcaatgcggggatcaaccagcgcatataagatgtccgcaattaaattccccactacaaccaaaacagctgaaatgaccgtcatggccatgataaccggataatcccgcgaaaaggctgaatcaataaacaatttgccgagacccggccaagtaaaaatctgttctaccactaccgctcccccgataaatgacggtatcatcaaaccaaaaatagtgatgacaggaagaagcccgtttctcaaaccgtgtttaaaaatcactttattatctcggaatcctttcgcacgcgccgttcgtatataatcctgttttaacacatcaagcatactggatcttgtgtatctcgttatccctgccatgtctgccgtggcgagcacaaaagcaggcagaatcaagtgatgcaatcggtcaaatatgttaaagtcagcattcaaagtgcttactccgccagtgggaaaccaccccagatttacagataaaaccatgattaaaatcaaaccgaaccaaaaattcggaatggcaagccctaaaaatgaagtaacagttatcccgtaatccaattttgaataaggacgtttcgctgacagaacaccaaatggaatagaaatcagaagagcgacaagggttgagaaaagcataagcacaatcgtattcggtaagcgggataagataagttcagaaaccggagtgcctttcttgacgatagaagtcccaaaatccccttgcagcatattccccagccatttcacatattgaacaggttccggatcattcaacccgtatttttcaatgaatttcgccctgtccgcttgactgattgtagggtccatcataagtgacatcgggtctcccggcgctgctttcatgatggcaaacgacaaaattgtaatgcctaagagaatcggcaaggacattaatgttcgccgtaaaatatatgtaaccatattcttgtcccctttttaaataggataagagaggaaaggaacctccttccctctccagggcttttgctatttttgatccagccaccatttttcaatattgtacaagtcatttttagggtggaatacatagccttgtaaattattcggcatcgctctgtggtaattgtaatagaataagaagctgtacggctgatcttcagcaattaatttgtatatctcttcatacttcttttggtattcttttctgtctgtaattgacttcgcttcttcaagcagcttatcgactttcgggtttttataccagatattattcagcccgtttttcgattggcttgaatggaagatagagaattgatccgggaacgttgcaagactccatccgagaagaagagcgtcataatcccaattaggggcacttgtctgttcgattaacgcactgaattcaacaattcgcggtttagcctcgattcccacttcttttaattgctgctgaacgacaacagctaaatcttcacgaattttattgccttgattcgttttaatttcaaatgagaatttttttccgtctttatcaaggtagccgtcaccgtcatggtcttcccatccggcttcttttagcagctgctttgcttttttcggattataatcaaatgtcggcactttagacttcggataattccatgacagcggactctcaggaacatccgctaccttaccgtctccgttcagcacttgatccaccattgcctgcctgtcaagagcgtaagtcaatgcctgacgcacttttttgtccttaaaaagctcttttttctcattccagccgatatagctgtagtttaagccgagatcagatttgaccttcacgtttccaaacgttttaaccgtatcaaaatctgtgcccggcacaacgaagaaatcaatatctcccgcttttaactgggccacggccgcgttagaatcaggaattgttttgactgtcactgtatcaaggtaaggtctgccgccaaagtaatcatcatttgcttccagtttgacatactcaccttttttccactcaacaaacttaaacggaccggagccgattggatttttacggttaaattcattctctcccagatctgcaaccggcaccttacccaatatatgttttggcaaaatgccgtaactgtcgagaacgacattatagaaataggcatcttttttcttcattttaaactgaatttcatattttccttttttcgttacggatttaagggactcaaaacccgagccacgctcaccgttgtaatccttgttaagagggatgctgtaggtgaaaacaacatcatcggccgtcagctcttttccatcatggaatttaacgccttttttcagttttacatcatacgttaatcccccgtcagcttctgttactttttcagccagcgacggcttgacgtttaatttctcatccgtttccaataatgtgctgtaaatcatgccttcaatatcagaacttgcaacatcggtagaataaagtggattaaaaagtgtgggttccccggttgacccgacaaccaaatctccgcctttttgcggttttcctgccggtttggattcggtgcttgtggattttgagccggagcaggctgacaggaagatggcgagcgccataaaaacacttagcatcatcagtgcgcttttacgtaatttcatatcaattccccctttgtgatatatatgcagcaaactggttatgtaatccggcataccccctctcgatgcttgtcatttcaggcatataaatggcaggcgacgtaatggccgggagcggcttcttcaaatgccgggatttgttccttgcagatcggtttggccatcgggcaccgcgtgtggaacacgcagcctttcggcgggtttgccgggcttggcagttctcctttcaggatgattcgttcccgcttgacggcgtctttttttctcgtgacgggcactgaagacaaaagcgcttgcgtataagggtgaagcggattgccgtacagctcgtgtttatcggtcagctccatcatttttcccagatacatgacgccgactctgtcgctgatatggcggacaacactcaaatcatgagaaataaacaaataggtcaggttgaattcatcctgcagttcttccatcagattgatgacttgggcctgaatggagacatcgagtgcggaaacgggttcatccgcaataatcagctcgggattcaacgtcagagcccgcgcaatcccgatccgctggcgctgccccccggaaaattcgtgcggatagcggtttgcaaagctcgggtgaaggccgactttcgccagcagctcctccactcgctcgttccgctcgctcatgctgtacatatggtgagtctggaacggctctttaataatggaacgcagcgttttcctcgggttaagggatgcgaagggatcttggaataccatctggatgtttttgcggacgctttttctcagcttttcttcagataagccggagatatcttgccccttaaagagaatccggccgtctgtcggcttgtataaacggatcatcgtccttcccgccgttgatttgccgcatcctgattcaccgacgatgccgagcgtctccccgcgcttcagtgaaaaagaaacgccgtcaacagcctttatatcaccgactttcctttgaaaaaaaccggagcggatcgggaaatatttttttacgtctttcagctctaaaatcgtttcttggcctgcagctgtcattttgattgggcaccctcttcctcatataaaaaacatcttacagaacggccgctttcatgcgttatcagctccggctgccctgttttgcatttgtccatcgcttttgaacacctcggggcgaatcggcagccttccggaagattatccggtgtcgggacactgcctttgatcgcttttaatgtatcaatctctccatctatcaccggtatggagtttaacagcccttcggtatacggatgaagagggtttaaaaataagtcctccacacccgcactctctacgacttgtccgcaatacataacgatcaccctgtcggcggcttcggaaaccacacctaaatcgtgagtgatcagcagaatagaagtatcgaattttttgcagaggtctttcatcagctccaatacttgggcttgtatcgtcacatcaagcgccgtcgtcggctcatcagcgatcagaagcttcggattgcagctgagcgcaatggcgatcatcaccctctgtctcatccctccggaaagacggtgcggatattctttcatcacttgttccgctctggagaatccgacgagttccagaagctcaacggcttttttagccgcttcttttttattcatttttttatggtattcaagcacttcggtaatttgttcgccgatggtcagcaccggattcagggaagtcatgggctcctgaaagatcatagagacgtcatttccgcggattttgcaatattcgttttcggtgaaggaggccaggtccctgccttccagcttaatcgagccgtccataatttttccgcccgagctttggacaagtcccataatagaaagcgaggtgatgcttttgcccgagccggattctcctacaagagcgacggtttcgcctttgttaatgtgaaaatcaaccccgtcgactgcagggatcggctgtttctttctgaaaaaataggtctttaaattattcacttctaatagtgtgctcatgatacgcccctttctcattccgctgaagcagagggaaacatacgtttcgctatcacaaaatatagaatagtcgaaaaattttatagttgtatattattacatcattattacaaaagcaagaattttttaggataaatgtaatatccttaaataatttccattcttttaatctattaaagcgttgcttccagaaaggtttttgaagggatggccaatgcttcttttactgttttttgatggtcggttaaatatttttttactatattgaatccgacggcatagccaagcattgaggggaagtatccttttccgtataacagctgggaaaacattctgctgtctctcgttaagcggaggttcggcttgactcttttttcaaacaaaaaatcaagctgctcaggcgtatagtaggacgtccattccgccgtaagacttgagccgaaccgctcatatacagcatattctgccagcccctccatcatgattgtatcaagaaatgtctcatctttttcgtcctttgtcacatgttctaaccggcagacgtgattatattcatgtgtcataagggcggatacagctgaattggaactatccgacgatagaaagaggaacattttgtcccgaaaggccagaccggattttgatccgaattcctgacggattttccggtttcgttcatcaacgggcaaaactacgatcggcacgtccggcccgttccacttctcctttaaataggcttcctctttttgtatatggctgtagcatcctttttctttcagccgtttactggtcctaacgccgtccttcagatggcggaacatgccgtggttttgcagcatcccgagtatcggcttccactctttcttatcggcccctgaaaaaagcggcaaaagatgcggggccaggtcatttacggatgccgccttttccatccattgatatgtctgcttgacgctcataccggttcgcctcctcttgttgttatcatatgcacgcacaaaaaaaccggccacctttttcaggcagccggtcaaaaactgtattattgatattttttaaagatcaaagtggcattatgtccgccgaagccgagcgagttgctgagaacgatgttgacatcctgctcgcgcgctttatccggtacataatctaaatcacactcttcatcaggtgtttcgatgttaatcgtcggcgggataatgccgtctttaattgccatgacggagaagattgcttcaattcctccggcagcgcctaacaaatgacccgtcattgattttgtcgaactgacggcaagcttgtacgcatgatcaccgaaaacggtcttaatggcttttgtctcgtatttatcattgtagtacgtgcttgtgccgtgagcgttgatgtaatcaatttcttcaggcttgatgcccgcatctttgattgcttcctgcatcgctctcgcaccgccttccccgtcttgggcaggcgcggtaatgtggtaggcgtcacccgttgagccgtagccgacaatttccccgtagattttcgcaccgcgggcaagggcatgctcaagctcttcaagcacgacgatccccgcgccttctcccatgacaaagccgtcacggtttttatcaaacgggcggcttgccgttttcggatcaggatttgtagaaagggctttgtttgcgctgaagcccgcaaatgacattcttgtcagcggcgcttccgttccgcccgtaatcatcgcatcggcatcgccgcgctgaatgactttaaacgcgtcaccgatagagttcgttcccgtcgcacatgccgtcaccgtacaggagttgactccttttgctccgagagcgattgagatttggcctgtcgccatatccggaatcatcatcggaacaaagaacgggctgacccttctcggcccttttgtcaggaagatttcgaattgggattcaagcgtttcaagaccgccgattccggacccgacccaaacgccgactctcggagcgatctcgtctgtgatgttcagaccggcatcttgaacggccattttcgcggctacgacagcgtattgcgtgaagcggtccatttttcgcgcttcttttttatccatgtgattttcaatattgaaatctttcaattcagcagctactttcgccggatactcgtccgattccacacgtgtgatcggtccgattccggatacgccgccgattgcatttttccagcttgtttcggcgtcgttgccaagcggagacaaggctccaagccctgtaacgactactctttttttactcatcttgtgtgcacctcacctttttttatcgtccccagcgtaatgctatggcgccccatgtcaatcctccgccgaaaccgaccatgacgatgacgtcgccgtctttaattttgcctgcttccagttcctctactaatgaaatcggaatggatgctgcggatgtgtttccatatttatggactgttttagacatcttttcaaccggaagctccaaacgttcccgtgccgcttccatgatgcggatgtttgcctgatgcggaatcaaaaagtctacgtcctctttggagaggccggctttttcaataacatttacactcgattcacccatttgccggacggcgaatttgaatacttctcttccatgcatgattgtatgccctttttcatctaagtacaagtgctgaccgcctgtaccgtctgctccgagctcaaatgaaagtatgcctctgtcgtcgctgaccggtccgatgaccgccgctccggctccgtctccgaacagcacagccgtattacggtcgtcccagtcggtaatgcttgagagcttttccacgccgaccacgaggacatgtttgtatgtttgcgattcaatgaattgtttggcggttacaataccgtacataaaacccgcacatgcggcgctgatatccatcgcgcacgcttttttggccccgagcttctcttgtatcatacaggaaacggtcgggaaagactggtcaggagtaaccgtcgccacaaggatcatatcaagctcctcagcggaaatgccggcctgatcaagcgctttttgcgcagcctcagcggccatgccggatgaatacatatcttcagcggcgattcttctttcttctatacctgttctcgtacgaatccactcgtccgatgtatctaccatttgttcaagatcatgatttgtcagcactttttccgggatgtaacggccgacgccaagaattccagctttcattggaaaagactccttttttataatgaatttaaaactaattagttatgatcaattattagtatcaggtactaattctaccctattttttttctgttggcaatatattcgtctaaactatcggacgctgctcctcatagaataaaaggaagacgaaaggaggcttcactatggatattttctccaaaatgatgttcggcgattccagagaccgggataaagaaccggaagaaaacccggagcagcctcaggctgaaaacgaagaagagatcgattacaaccacgtgttgaatcagctggggtccatcatgaactccctggatcaattaaagcccgtatttaaagactttgcgccgatggtgtccgccataaagaaaaaaatcatgtgaaaagccacttcatgaaaaagtggctctctttatttattcagctccccggcatcagatctgccaagctcatacgcttccgccatgaccgatgtaaacaggtccataaacggctgaatcatttccatagacagatctatgccggatttctcaagctccgcctttgcttccggcaagtatttcatcgcgatctgcataaattcaagagacttttcatgctgcatgtgtatccacctctattcatttgacggcagttcatttgtttgattatacgttttgacaaggtctgagattttgtcttgaaacgctttgtccaccagcgggctgaacgtccccatttcaacgactccttccctgaaatcaaagtcgtgatctccgctcttgagcgtacctttattatattgctcggcaattaatgtataggctttatctacgttttgcaccgtgcttgtcagcaccgtgtttttgccgagattcgattgctcggcgacatagccgatggcgtaaagcccgtcttttttgatttgctgaatgacaggaacattatacccgtctccggccggatatacaacatccgtgccctccgcttttaacttctcgtaaagatgcagcgcttcattgccgttatcccagtggtccgtaaattcagtattgacggtgatatcaggcttttcatatttcgcccctttgataaagccgtctacttcaggctgccacaaaaaggaggcgatgacaccgacctcattggtttttgacatatgggcggccgtcattcccccgaaaaaacccattgcttctcccataaggtgaacgcttgtgacattatcgcttttcgccgttccgtttgcgacgacgaattccatgtcgggataatccttgctgatcatattgaagatttcctcgtattcatttccgtgcccgtataaaagattgactccttttttatgaaaatcatctatcgcttttaaaatatcttcatcggatctgatattttctttataataaacgtcaacgttaaattcagattgtatcgctaataaacctttgtaaccttttgtgccccataccaagtcactgatggtatcggggaaaagcattccgaccttctcaatttttcctttaaacggagtttgtgtgcatccgctcaataaaaggaggacagaaaagatcatgacaagcctggtgatcaagccatgttcaaccccttttcaaactcataacatgtataattgatatacgtttattgtagcggtaatgcacataacatggaaggtatttcttaaaaaatgtcgaatattgatgaaaattgtcttttccattctttaattttttcttccgcttccgttttttgcgttttttcttttatttccagggtaataatctgattttcgtcttctgtgccgtcagcctcaagcttattcatcagcccccagaccgcgtcttctaaaaagatcctgctttctccatcttcttttgcttccgtccacggaccgtaaaggggaggaaggataatcgcttttgccgtatcccgctgaccgtttttttcccagtctccgtgatcctcactgtaaacaatccaatataaaggctcagcccttttttcaggcagacacccgctcccgtattgaacgcagatacgatcgtattccttttcaccgatttcctctattatttgaaaaagcccgtttctcgcgagccacattaaacgttcttctaaatacagctgcctcgttttgtcctccggttctgccaaaatgacatcaacgtgcacaccttcatccatcaaccgttcgcacaatgaaaggccgagaaattcatctgctccaatgatcagcgctgttttcatcacatctgccgcctttccggtttttcatacacacacaagccaaacagccctctgaaaagagatggctgttgtattctattcattacaggtctttttcatgactgcggaaaaaccggcagatggctctgtacatacgagcagggttctcaagcaggtgatacgtgatatcaatcttgcttccggtcttttcccgggcttctttatacgcgttcgcgtgcagggtgtacgggtacggcgctccggtcgttctttgccatatatgtaccggcacgcgggtgcggcagccggtaatggtctgatagctcagtgagcttgcctctttttcagaaacaccgaagctttgtgccgtttccctcagaaactgcttataaaaaaacttattttctttctctgattcaaaatgggcttgaaggtccagacaaggatctaacattgcggctgaacggatatgctccggtgaagactgcagcaattgatcggcgatgagggcgcccatgccttctgcgagcaagtgtattttcggattgagggtttcttgtttcagcacataatgaatcagctgtctggcgtaaagggcggctttttccgaaccccaatgccgtccgtataaattgctgttgaaaatggtgtaccctctgtcaagcagcgtatttaacagctggtttctcccttcatgttcgagccaaaagcttgagtcccggctgacaaagtgagttctgtcccccagaataaagatacagaagccgttcggccgatacggcagatggatgacgttcagctcagatccgaattggaaaaatctttccgttatccccatgcctgcccgcctccttttactcctaatctctctattggctatcatatgtaagaagaatgaaaacggatcggataaactcctatttgctgctatgttttggctattatcccaagcacaggaaccgaattttccgtcagacggcaagacaggcgggcacatgtcagtttcaggcgcgctttttgatgagaaaatgaccttccgcccgcgctttatgtatggtatgatacaacgtagaataaaatgaaggacgaggtggaaacgtgcggtttattatcggttttatttggacgttccttttaacacatatggcctgttatttggtcgcctccatgaacagcgcggcgtacaatttcaagcaatcatccgttattgccgtggttattgcggtgctagtctttgttcttgcggagatcatgcctgtcaaacaggatgcaaaccagcattaaataaaaaacctgctattcagcaggtttttttgtgttcacggttttcgttggtacgtccacaatctgttgtggtttgaagtttcagggaacatttctcccaccgtaagtttgattttttgcggatttttgaccatgcttcccgtttcgccgatttcaacgtacacaccgttattcggcgctttttgtcccgggcggaattgatgctgctgtcccacgtcatttcctcctttttcttttttatgtagtatgcgcttgtatgcggagaaatatcaaaaaccgctgaatgagattcagcggtttttttgttcatcctgtttgtatagaagagctttcaggagcgctttttgcgcgtgaagccggttttccgcctgctggaataccgcagagttcgtgccgtcgataatctcggacgtgacctcttcttcccgatgcgccggcaggcaatgcaaaaatgtatagtcgggtttggcgagactgacgagtgaggcgttgacttgatacggagcaaacacattcagccgctgctgcgtctcttcctcctgccccatgctcgtgaagacgtcggagtaaatcacgtctgcatcccgcaccgcttcctgcggattttcggtaagggtgattttcgctccggaaacagccgctgcttctttcgcggcattcaccgcctcttcctctgcttcatagcctttcggcgaagcaaccgcaatgtcacagcccatttttgcgcagccgatcataagtgaatgcgcgacattatttccgtcaccgatataggcgacttttactccttttaattttccttttatttcttgtattgttaacagatccgcgagtgcctgacacgggtgataccggtcggtcagcccgtttatgacgggaatatcagcatgctcggcaagctcttcgactttttcatgctcaaaggtgcggatcataatggcatcaacgaagccggacagcaccttggccgtatccgcgaccgtctccccccgcccaagctgcaggtcgctgcttgaaagaaatagtcccgttcccccgagctgggccattcccgcttcaaaagacacacgtgtgcgggttgaagatttttcaaaaatcatcgccaatgttttcccttggaaaatcggctgtatcggatgttgttttaataatgaagcttctgtcagaagcgcattgatgtctgacgggctgacatcttttaatgaaagaaaatctttgccgtacaaatgggttaatgtgtgttccgcttttattgtgtgcatgatgccacttccttttgataaagatctttgagcgatacaggctgaggtttgccggagccgcttgctaaaaatgcctttacggtttccggttcagtaaagaccgtcacaccgtgcgtcatggcttcgatccgttgtttacgcgcttcttcagagtgattgaaattaatatggaccgctttatcctttcgctctgcccatgccgggaacgcatctttgcatacggtaaatcccgcctcttgagcctgacgttccaattccgcatcacagccttccagatagatgctgccttttttctcccagacgtgcgcgtagatttttttcagtgcgctttctgcgtcaaacgcgacacacatgccttctccggtcgacttcatttccggcccgggctttacgtccacatcctgaatggcgtgagaagaaaaaaccgggaatttcactgccgttccgtgctgattttgaacctcgggcttgatgtctttaagggaagcgccggccagcaatctggcggcaagcgggatcatcggcacccccatcaccttagacacgacaggaaccgtgcggcttgcccggggattcacttcaagaacgagaatatcccctttgtcatcaatgacaaactgaatgttcataatgcctttaaaagccagttttaccgcgattttttcggcggcctcttttatattccgctgcatatcaggtgtgacagacggacccggaagaatcgcaaaactgtcgcccgaatggacgccggcccgttcaatgtgctctgtgtaagtcggcacgaatacttcatgtccgtcggaaatcagatcgatctccaattcttttcctgtaatgtactgatcgatcaaaatcgggtacggcatgcccgcttctttttccaggagctctgacatttgcgcttctgaatgaacgatgatcatgcccatccccccgatgacataagacggacggatcagcacggggtagccgattcggcttgctttttcagttgcttcttcttttgaataagccgtttcgcctttggcatgtttgaggtcaagatcatcaagcagctgataaaacagatcccgatcctccagcgcatcaagggtttcaaaggatgttccgagcagcggaatgcccgctttttccagcggttcagcggcattgatcgcggtctgtcccccaaactggacgatggcaaaatcaatgttttcatgttccgccacgtttaaaatatgttctgtcgtcagcggttcaaaataaagccggtcggcgatttcataatccgtgcttactgtttccggattgttattgatcataatcgtttcatatcccagcttttgcagggtcagaacgccgtggacggcgctgtaatcaaattccactccctgaccgatgcggatcgggcctgagccgatgatgagagcgcgttttttctcttttcggctgacatctccgtcgctttccccaaggtaggtggagtagaaataattcgtcttggcatcaaattcagcggcgcatgtatctacgattttaaacgacgggacgatgcctgatttctttctgagagcacggatgtcttcttccgtttttcccgtgagagatgcgatcatgacatccgtgaagccttttaccttcgcctgctttaaaagcgggacagacagatgatccccttcttccatcagcttgttttctaatgtgatgatatttcggaatacatggagaaaaaacgggtcaattttcgttttggcatggatatcttctatcgtttcaccgcggcttaacagttccatgacgacgaaaaatctccggtcatccggcgttaccgctaattcccacagctgattgatcgtacagccgccgagttcaggcaggcgggtgccgatcgttttcagctcaagggaggccgccgctttttgaatggccgcttccatatttctttcgatcgccatgacctctcccgtcgctttcatcttcgttccgagcgtgcggtcggcatgtttaaatttatcaaacggccagcgcgggaatttgacgatgacataatcaagcgccggttcaaagcttgcataagtagagcccgtcagcggatttttcagttcgtcgagcgtatagccgacggcaagtttcgccgccattttggcaatcgggtagccggtcgcttttgacgcgagggccgatgaacggctgacacgcgggttcacttcaatgacatagtactgtttgctgaacggatccagcgcaaattgaatgttgcagccgccgaccacatccagcgccgaaataatcgccaggcttgcggaacgcagcatctgatattcttcatccgttaacgtctgggacggtgcgacgacgatagagtctcctgtatgcacgccgacgggatcgatgttttccatattgcagacggtgatgcatgtatgattgctgtcgcgcatgacctcatattcgatttctttaaatccggcgatgcttttttcgacgaggcattggctgatcgggcttgctaacagcgcctgtttaataagcgtctgaaacgattctttcgttttcgcgattccgcctccctttccgcctaatgtgtacgccggtctcagaataaccggaaatccgatagactcagcgaagcggagggcgtcttcttcgttgtcgacgatttcgctttccggaacgggctggtcgagctctttcatcagggcgcggaactgctcccggtcttcgcctttttgaatggtttccaccgatgttcctaagagcttgacgtgatgcttcttcagcacgcctgcttcttcaagtttaacggctaaattcaatgccgtctggccgcccaaattggcaagcagaccgtcgggcttttctttttcaataatggcctcgatgctgtcggttgtgagcggttcaaaatatatttcatcggcaaacgcctcatccgtcataatcgttgccgggttgttattgactagaataacgcggtatccttcttctttcagagccatgcagccctgcgttcctgaataatcaaattcagccgcctggccgatgatgatggggccggagccgatgactaatatgctggaaatggttgtatctttaggcatgagcgatttctctccttgctggtatcactttctctagaaattcatcaaatatccactcgctctcagccggaccgggatgagcttcagggtggaactggacgcttaatacgggaaggcgcttatgaatgagcccttccactgatgtatcattgacatggtgaaatctgatggacagctcgttttcgtcaattgacgcttcatcgacgacatagctgtggttctggcttgtcataaacacccttttcgttttccggtcaatgacgggatggttggcacccctgtggccgaacggcagcttatacgtatttcctccgaaagccagggcaatcagctgatgcccgaggcaaatgccgagtgcagggaaatcactgagtaaagatgtaatccggttcatgtacggcgcaatcgctttcgggtcgcccgggccgtttgagagcacgattccgtcaggctgaatgtcataaacggcatccatctgctgatacggaatgaccgttactttacagccgcgctttacaagtgacgaggcgattgattttttataaccgaaatcaatcagcgcaatatgccggtctccgttccccattgaagtgatgtcttcagactgcgccagctccgccggattttgtgttccggatgctgcgggaatttctcctgctgttgacacagcagcgttcatcgtgccgccggagcggatggctttgacgacggcccgtgtgtccacttcggttaagagcgggatgttccatttatttaaatactctctcaagcttgagactgcttcatggtgagaaaaatgttcacacgcttcatagacggcaacagccttgacttgtggaattttactttcaaggtctttttcattaattccgtagtttccgatcagcggatacgtaaagacgatgatctgccccttatatgacgggtctgtaagcacttcctgatagcccgtcattccggtgaaaaaaacagcttcgccaacacagcaagcctctttttcaagttcaccgccgaatgatgttccgtcttccaatactaaatagcctttcatctaaagcccacctcttgatgaataattaattaaaaatatgaatttttatacctttatatcgaaaaaaattaccgtttcactgccgaatgcgcttcgatcgctgctttcagcatactgacggccgacagcatttcttcttcagaaaccgtaagcggcggaagcagcctgatgacattcggtccggccggaagcacgagaagcccgcgttcctgcagatctccgatgatgccggacacgggacctgcgcattcaatgccgattaataacccttttccgcggatttcttttacaaaaggccctgtcagttcacggttcagctgcgcttttaaaaaagagcctttgtctgccgccgcctggagaaagtccggctgaaacacaatgtccaaagttgctttcacagctgccatggcgagcttattaccgccgaaagtcgtaccatgcgtacccggcgtaaaggcgtcggcaagcttctttttgccgatcacggctccgacgggaaaaccgtttccaagccctttcgcagcagtgatgatgtccggagagatgccgaagtgctcatagccgaatgccttgcccgtccggccgattccggtttgaatctcgtctgcgataagcagcgcctgtttgtctttgcaaaatgtctgtaaggcttcgatgaattccggatcggcgggattgactcccccttctccctgcaccgtctcaagcatgacggcggcgatatcatcctcttttgaaagtgtgctgaatgccgacgggtcattaaacggaagatagtgaaagccttggagcatcggtccgaaaccggtcttgattttgtcttgtccggtggcggccatccccgcataggtccgtccgtgaaaggattgatgaaatgttacgatttttgtctttcccgttgctttacgggcaagcttaatggcgccttcattcgcttcggctccgctgttgcagaagaaaacgagatcccccgcgctatgtccggcaagctttgccgcggctttttcctgaagatcattttcaaacagattggaaacgtgccatacgctgccaagctgttctttcaccgcttccgtcaccgcatcatgacaatggccgagattggaaacggcgatgccctgaataaaatcgagatacgtttttccgttttcatcctctgcgattgtccctttcgcttttttaatatcgataggccagcggctgtaggtttgaaataggctgctcatgacacgctctccttttctttaacgatttttgttccttggaagacttgattggtgaaaaacgctccttttccgtttacgatcatcacttcctcgacatcttcactcagtgccgataatgccgagtttaccttcggaatcatcccccctgaaattacgccgtcatcgatgagggcctgaatttcttgcggcgtcaaagtatccagcctgttctctccgtccataattccttcgacatccgtgacaaataaaagtttatcggcgtgtaaggctgaagcgacggccgatgccgcggcgtctgcgttgacgttcagcgtttcgaaatcacttgtcatggaaagcggagcgataacgggaatgatgccttctttcattaatgcgtggatgattgacggatcggttttttgtatttcgccgacttctccgtatttgtcttgattaaggtaagacgcttgaaggagaccgccgtcctttcctgatattcccgcggctttcagcccgtttttcgcgagttcggttacgaaaaatttattgatcgtccctgacaagaccatttccgctgtttccagcaccggtttggtcgttttccgctgtccatcgacaaattccgtttcaatctgcaatgttttcagcattcttgaaatgtccgggcctcctccatgcacgacggcaaggttccagcccgattgcataagctcttttacattttgaaaaaaatcggcggataactcgcggattacactgccgccgcacttaaaaacgatggttttcttcatgccgctcccctttgctatgtgcgatagctcgcattgattttgatataatcataggttaagtcacagccccatgcccggccgctgccggagccttcctgcaggcggactgcaatcgtaatttcatcacctgataagtactccttggcatcagtttccgaaaacggctgaggttcgttgtgtttaaacagacactgaccgccgaggaaaacttccacttgttcggccgttacgcttgccgcactgtgcccgatggcgccgatgatgcgcccccagttggcgtctgtgccgtaaacggcggtcttcacaaggcttgagccgacgatttttttggcgataatattcgcctcaaggttatttttcgcgccttcgactctggcttcaattaatttcgtcgctccttcaccgtctctggcaatatctttggcaaggtcttcgcatacaagctttaacccctttttaaatgccggccagtcagggtgctgctccgtcaggcaatcattccccgcgcagccgttcgccatcacaagcaccatgtcattcgtcgatgtttctccgtcaacggtgatttggttaaatgaaacatccgtaatctctctgagcgcatttttgagcgactgttcttccacggccgcgtccgttgtgacaaagccgagcattgtcgccatgttggggtggatcatgccggagcctttcgccgctccgccgatcgtgatgatgtttccgccgatcaccagttcataacacgtctgtttcgtcactgtatccgtcgtcaaaatggcttcttcaaatgctccggacactgacggcgcttgaccgagctgttcaatgcccgcctgaatttttttcatgtctaaaagctcgccgatcaccccggttgacgaaaccgcaacaagctccggctcaatgccgagctggctcgcgaagccgtcccgcatttcataggcgtcctttaatccttggtctcccgtacaggcgttggcaatcgcgctgttgacgataaccgcctgaagcacggcctctttttttaagctctcttgcgtcactttcaagggcgctgcctgaaaatggctttgcgtatataccgccgcactgactgcaggcgcttcgctgataatcgctccgagatctttttttgaatagcgcagaccgcagtgcacgccctttgcctcaaaccctttcggcgaagatacgccgccttttactttcgtgatttcctcactcagctgaatcatattttcgaatccctctttcgttctatggatagactggcgtcatcgtaagtcccgtttcttcctgccagccattcatgatatttaaattttgaaccgcctgccctgcggcgcctttcatcagattatctatgacagaaacgatggtggcacggtttgttctttcatccacggtgacactgatatcacaaaaattgctgccgtatacctctttcgtcgccggaaattcaccttccggcctgattctgacaaaatatgaatctttgtagaattcggaatacaattctcttacctgtgcagcagacataccagggggagcctccgtatatatcgtcgccataatgccccttgtcatcggcgccaaatgtgcggaaaacgtgatcggacctgtgccgggctgccaagccgctaattgctgttcaatttccggagtatgctgatgctcattaaccttataaattttaaaattatcattcagctcagaataatgagtgcccatggatgcttttcggccggcaccggatacgcctgttttcgcatcaacaatcagaaaagaatcttgtaaaagcttattcttcgccagcggggcgagcccgagcagcacagccgtcggaaaacatcccggattggcaatcagcttagcagtctgaatctcttctttttgcagttcggctaaaccgtaaaccgcgctttgaatcgttcctttcggcgcggccttccgcttataccacttttcatacacggccgggttttgaatccgcagatcgccggatagatcaatgaccgggatgcccgcctccgccagcttgggcgaccactctccggaaacgccgggcggcgcggctataaacatgacatcaatttcgtttcgaatcgtttctatatgaagcggctgaagtgattgtgacgctatattcctcaaatgcggatatgaagcggcatattcttttccttcgtcgctcgatgaatataatatacaatcttctgcataagggtgatggttaagaatcctgacaagttcggcgcctccataaccagtcgcgcctataatacctattttcaacgggttcaccttcttggtttttgtgaaattatttaacattataacatgaataaaaattaattcaattgtatatttaatattttttcattcattttccatcggttttcgctgacaaaaaccccctctcgatcgagggggtttcataagaaaaacaggctgatcggatcagcctgtttttttcagcatcatcagcccgcttataaaaaacagcacggagctggcgtaaaaaataatataaaccgtgaagaaatcagcgagaaacccgccgagaataatggcggcagctgaaaatacggccgtccagaaatgatagctgccgacttttttcccccgctccccgccgtcagtgtaatcggcgatcatgattttctcgccgtgtttttgcatggcgccgaacaggcccaaaagcacctgcaccacataaacctggtgcacgccggtaatgtgcgggagcgtcagaagaagcaccgccatcccccacgaattcgccatcaggaaccagcggggatccagtcttgccgacagccggccgagcagcggatgaatcaatgcgccgctcaggccgaacaagccgtatgatagaccgaattgagtgtagctggaaccgatgtttttaataaataaaatataaaacggaaagatcaggctgccggcaaaaaagacactgctctgagacaggatcagccattttaaatggttgtgtttcatgatttgtacctctgataaaaataattcataaacaagtcatcgggatcatatttgtgttttttctgaaagaacatatcgcttttcggatatgcctcgcgcatctgctctttcgtttgatacagcatatacggcagataatagctgccgcggtggcgcaacgccgtatccgtcatttttctgacaatccgcgctgcactcgcctggctgtcttttgaaaacccttcattgattaaaagaacgagtgaaaacatgtcttcctttgcgtatgacagatcggctttttcatttttttgcacgtagcggatcgtaatatttacgagattgagatcttcatgtgacagcgtcttgcgtaaatcatgaatgtacggtgcaaattcgccgacgggcacgaagtattcttgaagcacgtcggtgttgtccgtgttttcatattccaaaaatttcgattctgaccgcatgacattgttcctggagactttcacgccgttttgactgagaaaataagactgctgggttgaccagaaccaatttcttccccagtcataccggcgggagaggccgagcgcgaatttcgtcagcgccggatgctcatcttctttcagttcattgtgccgctttaattctttctggttgtctgagagtgtgtaatcagtcacatacatatcgtgcaaaaagcctttatcccctgttgcgatccgcgcgagatgcatgcgcacggcggggttgcgctgaacatgctgcgtaaaatattgactgtatgtatcagcgttcatgcgtttcgttttcatttcataaagctcatcatccgtcagctcaatatccgcgtcaaggatgacgccgaacaggccgtagccgccgatgacggctgaaaacaggtcatctttcggagtaacggtgatgactttgccgtccgcctttaaaagatgaaacgatttgaccgtatcaatcagcgaaccgtaccggatatcccggccgtgggcgttggcgctcagtgagcccccgatcgtaaaaatgttttgcgattgcatgacttttaccgcgagcccgtacggattgacatagcgctgaatatcattccacgtcgctcccgcctgcactctgatgatttttttctttcggtcgagaccgagtattttgttgtagcccgtcatgtcgagaacgatgccgtcttcataatacgtctggccgcccattgagtgctgggcgcctgcgattgagatcttcaaatgctttctctttgcttccttaatcgtttcgaccaatgtttctttctcttttcctttgaccgtctgcttaattttcacgggcatgagacggcttacatccgtcattgtccctgcctgccgctccggctctttgtgaaaggcggaaacagcgaacagcgccgtataaacaagaatgctaaggataatgagaagtaattttttcttcatgggttcctccctcgcatgcagccggtctattatatcatgcctccgtccgtttttttcctttttaacccgataccgcaaaaaaccccgaatggcgggaaacttgttttttttagtgacttgcccttctttccgcacgccggtctgcagcgacaaagcagacgcgtccggcagaatcatgtttagtacagttcaaaacggtcatccggaaaacaccaggcataaaaaatacacagaaatccctaaaaatgattttttagtcagtatataatcgatatatatgcagatgtattaccaaagggattgtttaaaacaaagatgttaaatgaggtggggaaaatgaacataaaagggatcaatcatcttcttttttctgtttcagatttggaaaaatctatagaattttatgagaaagtatttcatgcacaacttctggttaaagggcaaaaaacagcatattttgatctgaacgggctttggcttgcacttaacttagaggcggatataccaagaaatgaaatacataaatcctatacgcatacggcctttacaattgacccaaaagattttgatgcaatacttcaaaggttaaaaaatctaaatgtaaatatattaaatgggcgtcctagggataagcaagatcaaaagtcaatttattttactgatcccgatggacataaatttgaattccgcacaggtacactccaagacagactgtcctattacaaaaaagataaacctcatatgaaattttatatataaaggtttgtttgcaatccaaaacaagccctcactgtcgcttatatgcagacaaaagaaaagcacctccaaactttaggatgtacctaaaatccggggtgcattttcttattactgaatccctaatgcgatttttgcgtagcgtgacattttgtctcttgtccacggcggattccagacgatgtggacctccgtctcttttacatccggaatgtcggcgagcgcttttttcacctcgtcgacgatgatcggagcgagcgggcaccccattgatgtcagtgtcatcgtaacgtgcgtcaggccgtcgtcatccatatcaacgtcgtatacaaggccgagattgacgatatcgacgccgagctcagggtcaacaacctgctccaaggcgcccatgatgttttcttttaatgcttcttccacgttccatcactcctttttcctcagtataacgcaaaagcggcttttgttaacacctttgtgctttataaatgcttatcgaaccaggcgacggtttctaaaacggcgtatctcgggactttatgatcagcccgttcgtctttcagaaactgaagatggtcgggccggctgctgtaatgaggtttaatcgtttcataaaagccgcgggtcggtgcatacggaacgactttgtcttgaacgccgtgccagaacagcagcgggcggctgcggagtttttccggttccagactgagatcgaacggtttgagccgcgcaaacagttcatcgacctgttcttttgtgacgtcaatgtcgatgtccttcttttgaatgtggtcaatctgctgctgaaaaaatgccgtatagttcggacttcccatcagactgacgccggctttgacccaatcatacgcagccatcgcgccgaatgtcgtaattccgcccattgacgtccccgcaagaccgatccgcccgtcttcaatcagaccgcgcccttcaaaatcctttttcagcacgtcaagctcctcgatttcatttaagacaatgtcccaaaaatggacggcgagctcttctgctgacagctgttcagcgcgttcaccgtggtaaagagcttccggcagcacggctctgaaacccttttcagcaagcaggtaagcgaaatgaagattatgctccttcgcgcttgtaaaaccgtgaataaagaaaacaaggggagcgggacggtcccgattttcttcttttacaatatgtaaaaacggaatgcctgatacggtttgatgatcaataagaatcacgttgactccctccttaggataaccataatcataagtgtaacatgtagacaataaagatggtaaaaagctacactgtacataagagaaaaacagcaaattatatgacaaaaggagttatttatggagacaaaaccttacctcatcgccttagatctggatggaaccttattaaaagatgataaaaccatttcccctgaaacggcacggacgattcagacgctgaaagaagcgggccatcatgtctgcatctcaaccggccgccctttccgttccagttcgatgtattatgacgagcttgggctgacaacgccgattgtcaattttaacggagcgtttgtccaccacccgaaagacgagtcatggggacgataccacacgtctttatctgtcgatgtggtcagacagcttgccgaacttacagagacctaccaaatacataatgtgctcgctgagatcattgatgatgtgtacttccattatcatgatgagcatttaattgaggcgtttcatatgaatacggcgaatgtcacattcggcgatctgcgcgaaacggtccaagaggatgtgacgtccgtattgattcacgcgaaggaagaggacgtcgcggacatacgcgcgcatttatccgatgtgcacgccgaggtcattgaccacagaagatgggcggctccttggcatgtgattgaaattattaaacacgggatgaataaagcggtcggcctgaagaaaatcagcgactattaccaagtgccgagagaacggatcatcgcgttcggcgacgaagacaacgatcttgaaatgctccgatttgccgggtgcggcgtagcgatgggaaacggcacggatgaagtcaaacaggccgccgatcgcgtcacgggttcaaatgaagcggacggaatcgccgaatttttaaaatcctatttctccctgtgaggttttcccgctcataacacaaagccttccgcccatactaaaacagacgactcatctcgtctaaatatggaagggggacattgcaatgggtaaacgaaacaaatcaaaacggtttattcagcaaggcaaggactctgtcagtcttcatgacgcaagatttccatatcggtctacattagaggaagcacagcatgatgcagcaaaagattcggctgaaaggcaggttgacttttaatgagaaacgaactgttttctcaagccaagtcatttgtccagcaggccgtcatgattgctaacggtttcgaggacggcgaccaggaaaaagctgtctcacgcgccaaaaatgccgtgtcttccgcgtacgccaattcgacggatgcagaacgtcagcagctgcaccaatttcaggatcagctggagaaattgcaataaaaaaaggcgccccgtttagatgagggcgccgcttttttatattacttcaaatgtttttaccgttttcagtctttttccgatctgatcggacttccctaaaaacgtcaccgtcaccgtgtatgttcccggaccgggcacgttcttccacacatctgaaaagtcatacgtttcattcggcattaaggtcacggtctgaaacgcctgggtaaacattttgtcttttgaatagcggtacagttctttgtgatgttggtcatgtacggtcagttcgaatttctgccctgagctgaatgtgaaatcgatcgggctttcgcttttgttttttaaagacatttgaaattcgatctgctgatctgtctgcacaggatttacggctaattccgcttgctgttcattcatctctccggatacctcctcagcgggctccttctgcccggattgactgctgcatccgatcaataaaatgaccggtaataacaggccaaacagccacttcattctatccgctcctatcagtcttttctgaagaaaccaaagatccccgtcgtttgcacgatgtttgtgaaggctttcgggtcgacttctttcacgattttctcaaggtcatacaattcgtaccgcgtgatgacgatgatcatcatttctttctgttcgtttgtgtaagcgccttttgccggcaccgtcgtaatgcctcggaccattttcccgtaaatcgcttctttgatttcatcagctttttttgtaacgatcatggcggtcagtttcatgtggcgcgtgtgaatggcgtcaatcacccttgttgtgacatacagagcgacaagggtatataatgctttctcccatccttgcaataatcctgccgtcaaaatgataatcccgttcaaaatgaagaaatatgtgccgaccggtttatccttccatttggccagcaccatcgacacgatatcaagaccgcctgtcgaagcgccgaatttcagcgttaaaccgatgccgatagctgagatgactcctccgaatacggtattcagaagaatatcgtgtgacagtctcatttccgggagaatccccataaagacggacgtcagcgctacgcttaatatgctgtatacggtgaatgatctgccgactttcagccaccctaacacaccgatgggaatgtttaagaggaacatgagaactcctgtcgaaatataaaagggggcgtattgatcaacgacgcttgacagcagctgggcgacaccggtaaaaccgctggaatatacatttgccggtatcaggaataaattcagtcccgccgcatacagaaacgcgccgatgacgacgattgctaatttttttacttgttctagtaccatggcttgctcctccgctcattttcattattagcttttcccttaaaataaagttttgaacactattttgccaaatttatatgatatagttggcatcactctcaccaaccggaaagaagggaattatgatgacagttcaccttattgctgacagcgcctctgacctgccgaaatcttatattgaagaaaaccggatcgggttcattccgctgcacgtaacacttgacggaaacgaatatgaggacgcggtcaccattcaggcggatcatatctttcaagcgatgcgggaagggaaagttccgaaaacatcccaggcatcaccggatacgataaaaaaagtatttttacaatacgcggaactgggagaaccggcgatatacatcgccttttcctcaggtctttccggcacctatcagacggccgtaatgatcgccaatgaagtaaaagaggaatttcccgattttgatttacggattgtagattccaaatgcgcttcattgggctgcggcctcgcggtgatgcacgcgcaaacactctgtgttaacgggaatacaatacaagaaatcgaaacgtctgtaaagaacttttgcgcacggatgaaacatatatttacggtcgatgacgtcgcctatctcgcacggggcggcagaatttcaaaaacgtccgcttttgtcggggggcttttgaacatcaaaccgattctgcatgtggatgacggcaggctcgtgccgctcgaaaaattgcgcggacagaagaaactgtttaaacggattatagaaatgatgaaggaagaaggcggcgattgggcggatcaaaccgtgggaatcagctatgcagataatgaagagacggcgattgggatgaaggaaatgattgaagaagcgttccatccgaaagaaatcattcttcattcaatcggctctgcgatcggcgcccactccgggccgggcacgctcgcgatttttttcctgaagccataatttcaatgcgggcgggcatcctaacggacagaagggaggctttgccgcatgaaagatgatgacaaaaaaccgttggacaataacgccgtaaaccagaaaaagaaccggcttgccgaaaaaaaccggcaggcgggaaaaaaccagaattccaaaaaaccggaccatctgtaaaagcaaaacagccctcttgtcttaggagaaagagggctgttttttgcgcacggatgtctgttacaaagtaaaccggcggacctgatcgtttaaccgctctgtcaggctcaccagattattgacgctttccgccattttatgaaaagaagacagctgctcaagcgcggaggcagaaatctcttcgcttcctgcagccgtttcctgaacgacggcgctgatgctttcggcatgatgcagcacttgctcaccaagctgtttcgattcgatgatccgtccgtccaattgagtaagctccgccttaatatgggcggctttttgttcaatatgggcgaatgattctgacgttttctccatcagctcctgctgtctgtccgctaaagcgacgccggtcgtgacagctccggtaatagatgtgatgccgtcttcaatttgctttaccatatcgaaaatctgcgcggtcgctttggctgatccgtctgcgagcttccgtatctcctcggcaacgacggcaaatccttttccggcctcgcctgctctggccgcctcgattgcggcgtttaaggacagcagattggtctggcccgcaatgtcggaaacggtctgcgccatcatactgatgcctgccgcatgcttagcggctttgtccgcatcgtccgtcatcgtttttttgagcgccgccagtttatccgagctgcttttcatatagctttgtacatcttctttctgggcgtctgcgagcgtataggaatagccggtgatgctttcttttaacgtattaaggtcggcttttgcttcctggacgtttaacagcgcgtccacttcatcttcatttgaagcctgaatcttcatcatgtttacgatggtaaagccgatgacggcggcgaagcaaatcatcgtaacggctgcgttaacgagcagccttgtccgtaatgtcacttcagatcgcctcctttttcaatcagactgtttttcatatccgtgatctttttcgtcagcccgcctgcgtttttgacaactctgatcttggctaagtccatgccgttttccttcagtccgtaaacgatctcaccgcttttgatctccttgttgtcttttaaatctttcgccaattcatagatgacatggtcgacgtttttcactaaagaagagataacggcgtgctcggcggtgtaatattgatcgctgtcaacaccgatggcgtatacttttcgcgcctccgcttctttcagtgcgccgacacccgtgaagccggccgccgtaaacaggacatcggcttttcttcggatcatgttttgggcgatgcgcttcccgagcttatcatcatcaaacgtaccgctgatttccgacagcacgcggatgttcggtttgactgattccgcgcctttcaggtagcctttcttaaaccgtttaatgacgtcggcatctgaaccgccgataaatccgatcgtgccggttttgctcgtcatagccgcgagcgctccggctaagaagcctccttcatcctctttaaacgtgacggaggtgacattatccaggtctgatacagaatcaatcagcacaaaccgctgcttcggatattttttggcgaccttttctaaatccgcctgcatgctgtaaccgagccccacaacaagatcattgccttcccggacaagctgggtcagtcctttttcgtacgtaccggtgtcttttatttctctgtaatcaaatgtgatgccgagctcgtctcttgctttcatcaaaccttgaaagcctgaatcattaaatgattggtcgccgaggccgttgtctgtcagcatgatgccgattgttttcgttttttcagccgccgccccctcggatttgccggcacatcccgccgtgctgagcgcaagcagcagtacagccgcaaatatcgccatttttctcattgaaactctccttttgtttttttctatagttatatatcggttcggatgtcagaatattttatttcaataaaatatgtatgttcggcaggttgataaacaaatgagggcataggagcttttgagaaaataaaaaacaccggttttggttcaccgatgtttttgcagaaaatttattgtttttcgtatgtccagccgtctttctgatacactttgccgtttttcatcaggtgcccgagcgcccgcttaaaggcggctttgcttaaatgaaaccgttcgcggatatcgtcaggatcgcttttgtctccgtaaggcatcgcgccgtttcttgatctcagataggtcagaatctcctccgcgtcaaccgaaagcgcatcctgctttctcggcagcagggacatgttgacggagccgtcttccttcacctcgatgacacgccccgtcacgcggctgccgagtctcggctcttcttttctttctgaagggtgaataaacgcgcggatgccttcatcggtaatcagaaaagagcctgatgcgatcagtctgtacaccgtgcctgtcaggtctttattcatgacgtcttcctctgcatccgtaaataattcactgatgatatcctcaggcgccggcttggcaaacatgcgtccgcggcttgtcaccttcagcatgcaatacagtctgtcgcctttttgcggccagacggatttgtacggaggcaggtgctccgttgcgacgagcgcgtcttttgacagaccgacgtcgacgaatacgcccatatcctccacagcgtccgtcacttccacccatccgtagtcataaaagctgatgagcggctttttcatcgtcgccgcgagtctttcctgatgatcgacgtaaataaatacgtccacttcatctctgtcttcaatatcctctgtaatttcactgttatgtaaaagaaccgtatcctcgccgtcggttaaaaaataaccgaaatcggtttggtgatctatactaagcgtgagctgctgccctggtctcatgttatcgtccttcctgattcgcccgtatggggctgatgtttttctcattttttccaatatgcataaattcatgctttatgcagttggacatttctctttattctactataatcaactcataagtgaaatgttataggaggttttctcatggcaaaagaaagttcttttgatattgtatccaaagttgaatttcccgaagtgcagaatgcgattcagatgacgctgaaagaaatcggcacgcgctatgactttaaaggatctaaaagcgatgtaactttagaaaaggaagaacttgtcctgatttctgatgacgagtttaaactgaatcagctcaaagatgtgctgagcggcaagctgatcaaacgggacgtgccgacaaaaaacattgaatacggcaaaatcgaaaatgcctcagggggcacggtgcgccagcgcgcgaagcttgtacagggcattgataaagacagcgccaaaaaaatcaacgcggtgattaaaaactccggcttgaaggtaaagtcgcagattcaggacgaccaagtgcgcgtcaccggaaaaaataaagatgatctgcagcagattattgcagccgtccgcggggcagacctgccgattgacgttcaatttattaattttagataaattatgtgattcctattgattattgtctctattttcggtaaatttggagaaagggattttcacagttaagttttggaaacccatgacaattacatgaacgttcttatcaagagaagccgagggactggcccgacgacgcttcagcaaccggtgtaatggtttaacccaaaccatgaccaaggtgctaaatccagcaagctaaaaacagcttggaagataagaagagagacaaatgattacagagtcttcttcttaagaagactttttttatttctcttttttccttgctgaatgtgacgaaggaggcaaacaatgggactattacaagacttaaaagaacggattttaatcggagacggcgcgatgggcactctcctctattcctacggcattgacagatgttttgaggaactgaacgtatcaaagcccgaggaaatcaagcggatacataaggcttacgtggaagccggggcagacatcatccagacaaatacgtacggcgcgaattttattaagctctcaagatacggacttgaggatgaaacgaaaaaaatcaatcaggaggcggtcagaatcgcgcgcgcttcctcagacggcgcttatgtattgggaacgatgggcggcatccgcacatttaacaaaaacgcctacagcctggaggagattaaacgcagctttcgggagcagctttatttattgcttcacgaagagccggacggtctgctcctggaaacatactatgatttagaagaggcgcgcgaagtgctgaagatagcgagaaaagaaacggaacttccgattatgctgaatgtatccatgcacgaacagggcgtgctgcaggacggaacgccgcttcgggaagccctcaggtcaattgccgatctcggcgctgacataacgggaatcaattgccggctcggcccgtaccacatgattgaagcgctcaccgaagtgccgatattccgtgacacttatttatcggtctatccgaacagcagcctcccgtctttagaagaaggccggcttgtttatgatacggacgatgcctatttccgggagagcgccgtacagttccgcactcagggcgcgcgcattatcggcggctgctgcggtacgacgccaaaccatatcagagccatggctgaagcggtccgcggactttcccccgtcactgataaagaagtgaaaatcagacgggaagaagaagtcatctccgtccggaatgaacggaccgagccgggtttaaacgaaatcgccgctcaaaaacggtcaattatcgtagagcttgatccgccgaaaaaattgaattttgacaaatttctgcaagcggcggctgaattaaaagaaaccggcatagaagcgctgacgctcgccgacaattcattggcgacaccgcggatcagcaatgccgcctgcggttcattgctgaaagaacgccttgatatccgttctctcgttcacattacatgcagagaccgcaacatcatcggccttcagtcacatttaatggggctggatacgctcgggcttaccgacattttagccatcacgggcgatccttcaaaaatcggcgactttccgggggctacctccgtctatgatttaacgtcctttgacttgatcaggctgattaaacaattcaacgaaggcatttctttatcagggaaaccgctcggcaagaaaacgaacttttccgtagccggagcatttaatccgaatgtccgccatcttgataaagcggtaaaacggctggagaaaaaaatcgagtgcggagctgactacttcgtgtcccagcctgtctactcggagcagcagctcattgacattcatcatgaaacgaaacatctcaaaacaccggtgtatatcggaattatgccgttaacgagcagccgcaacgcagagtttattcatcatgaaatcccgggcattaagctgtcagacagcatccgggaaaaaatggcgctcgccggcgaagacaagcaaaagcagaaagccgaaggcctcgccatcgccaagtcgcttctcgacacggcgtgcgaactgtttaacggaatttatttaatcaccccgtttctccgttctgatttgacatcagaacttgcagcttatattaagcaaaaggatgaaaagcgggctgatgtatatttgcattgacgcggaagatgccgcctgatacgacaggcggctttttcatggtacgatacagaaaaagaatcaagcaaaggaggattttttcatggttgaagtaaaacccatcaccgcagaagacacatacgcgatcagacacagcgtgctgcgcccccatcagacgattgaggattgtaaatatgatcaggacagcgtcaaaggagcatttcatctcggaggtttttacgacgggacattgatcagcatcgcttctttctacccgcagaaccagcaggctttacaggcggcgcccgcctaccagctgcgcggcatggcaacgcttgaagaataccggacgcaaaaagcgggaagcacgttaatcgcctatgcggaacgaaaactggcagatatgggggcggcgcttgtctggtgcaacgccagatgtcacgtgaagggatattacgaaaagctcggctggaaaagcacgggcagcccctttgacatacccggcatcggcccgcatgtgatcatgtataaagaactcgcctgaaacaggcaaaagcccgtggcatctcttataagggctttgttttgttatctttcggcgtgccggatgacgttcaaacggaatgaagcttttataagcgccgctattgacgcgatcccgctttgatattaacctttgttcagtaaacaacacgcaattcggcaagggtgggcaggggcgaaaacgatatctgccaattgccgatttcagctattatgtttagaaaagggagtatgagatgaatacgatccaaaaaccgaaaatcccgaaagaattgccggtgctttctttcactgaagcgcttcaggatgaggagctcaaagaagtcatcattgaaaacggcatcgtaaacggcaaactggacggcctgcgcgccgaaaaagtcattttcagaaacaccgtttttacggatgtctctttcagacatatggaatgtacggatgtcctgtttgacaaatgcgatgtctcaaacgctgatttcagcggaagcatcatccatagaacggcgtttcagcattcaaaacttctcggcttgaatctggcggattccgccatgcgtcatgtacggtttgaagactgcctcgcaaattacagctccttcagctattccaatatgaagcatgtccgttttgactcgtgcggcctttcagaaagtgagtggaatgatgctgttcttgaatacacagatcttgacgtctgtgatttgaacggcgcaaacttcatcggcacgtctctttttaatatggatatcagcacgtgcacatttgatcatctgcacgtctcgcttgataagctgaaaggatgccgcatctctccgtctcatgccgttacattcgcagaagcgctcggcgccatcgtgacgtgattttttattaaacgaaaccgcggatacaggcggccggctccccggcatcctgaatcaatgctcggcattggtgatgtggggtgctgctttttattttgcggcgcttttgtttcgataaaaggaattcggccaggtcatgttgaatgtaccggaaggaagagggggaattggaatgtcagacattttaaagctgtatcactaccatagatgggccaatgagcaagttattcagcatctgaagaccctgcccgcggcaagcttacagcaggaactggatagtgtttttccgactttgaacgccgtgcttgtgcatatatgccgggctgattacacttggcttcacgtgctttacagagaaacttacgaacaaatcgtctcgcagtttgatcaatttgaaaagcttgacggagattttgaggcgattgaacatagaatgactgaactggacaaagaatacagcgaatttttaagagaatcggagaacatggaaggcccgatctccatttctcatccgcgcatgggaacgcttcggacgacatatgccgatgtgatccggcatattgtgaatcacggcacataccatcgcggcaatataagcgcgatgcttcaccaaatgggctataaaggcgtgccgactgactacatttttttctcatatgaattataaaaaagcaaaggcatgccgggcctttgcttttttacttcgaatctatcataatccggcatagccgggggcgcccggggtaagctttacaggccttccggttttaaaagattccgtcgcggcgatcccgatttttaagttaatcgcggcatcgatgtctgtcacaatcggcgtttccccttttttcacacattcggcaaagtgctcaagctccagacggtaagcgtctttaaagcgggcttgaaaatccggaataatttcgtagctgctgcctgactccgttaaaatggtgacatggcttttccgcagcgtgccgactaaaatgcttccctccgtcccgataatttccgcgcggatgtcatggccgtacggagaatttcggcttgcctccacatcgccggccgcgcccgaatcaaactcaagatatgttaatgcctgatcgacatcgccgcactcctccatgaacgggtgctttaaaatcctcccgtgcccgctgacagacgtaacctcggcattcatgagatatctcgcgatgtcgtaatcatgaatcgagcagtcaatgaaaagccctccgctatgtttgataaattccgcgggcggtgcgccttgatctcttgtaaatcctttataataaatgggtctgccgatttccccggcgtcgattcttcttttcgcgtcggcgtatgccggatcaaaccgcctcataaaaccgacctggcagatgacgtccgtttcttcgatttttttcatgacttttatcgattcctcaagactcagggtgagcggcttttcaacaaagatgtgcttgccgttttcagccgccttcatgatcatttccgcatgtgtgcttgtcggcgtgacaatgatgacggcgtcaatcgtgagatcttccagcagttcatacggattctccgtccatttggcgattcctaattctttcgcacacgcttccgccttccccttcatcgggtcacagacggccgcaagctcggctccccgcacttcgccggctaaatgcttcgcatgaaaataccctaatcgtcctaatcccagcaccgcacacctgacttgatctgtcatctatcaccgctccttttttcttgaggccgcatgccgtaatggcgcaagcggtttctcttattaaacagaaatcattattttgaaagcgctttatttacaactcaagctgtttgctttctttgcttgcaatccgcagtatttgcgcaagcgctttctcaaaagctgttttaattttacaatgcttttcgctcgtttgacaatgtttttcacagaaaaaaacgcgccttatcgctgagggcgcgtttttaccggtgccgtagaatgcctgatgacgagttccggagataaaatgattttgctttttgtttttttcttcccttgaatctcatcaatgagaagttcaacgacacgccgccccatttcgcggatcggctgagaaatcgtcgtgagcggcggtgccgtcatttcagcgagaatggtattgtcaaagccgatgacggacaagtcttccggcacccgaatgccccgggagcgcgccgcctgtatcgccgcacatgacaagacatcattaaaggcgaaaacggcggtcggaaggtctctgtcaaacagctcgcccgctgcctgttttccgctttccagcgaatattccgtcggtatgatcagcgattcatctagtgtcatccccgcttcccgcagcgctttttgaaaacctttgattctgtctctttcacccgtggtcgaaccgtttccgacgatacaggcgattctttcatggcctaaagatatgagatgctcagccgccgtatagccgccgagaaagtcatcgataatgacgacgtccatcggcgcgagcggtttatcctgcgtaatcatcgcaagcgggatgcccgatttcacaatatcatcaagcgccgtgacgctgtcatcatgatcaagtcccgtcgcgaatataatgccgtccgcctgcttctgccgcagcatcgaaaaatacttcgtttctttttcaggctgataatcggtgctgcagataatgatatgaaacccaagtacaccggcgctgtcttcaatgcttttcgccagttccccgaaaaacgggtttgaaatgtccggggtgatcaggccgatcatattcgtctttttgcccgtcaaagcggatgcgtgaacattcggatgatagtccatctcctccatgacacggagcaccatccggcgggttttgtcactgatcctccccgtattgttgatgacccgcgagacggtcgagatggagacgcccgctttttcggccacgtcgtaaattgtcattttcatgcttaccgatccctcttctgttctctggtattaggtcagtccgttttccggcttacgaatttgcggtattcaagcggcgaaatgccttcaatctgtttaaacagtttggaaaaataggttgggtcctccatgccgatggcgtccgcgatcgcccccattttgtcattggttgcggacaaaagacgtttcgcctccgtcattctgactttgttcgtatactggccgggcgtgacgccgagcacctgctgcatgcagcgggtcacgtagtcttggttgtaatgaagtgccgaagagagcgctttgatggttgttttctcctgatagtgctcctgcaggtaccgggcggcctcccatgcgactctttcctttgcggacgggatttggaacgcttctttctgaagatggagcagcagctcttcaaacagaatctgctttctgagcggcaggtcggagttctcggcgctttcatctgtcagcacactgaattgcccggccataaactgcgggcgtctcaccttccctttttgcggcagggacaagcggtagcgggacggctcttcaaagctccctttttttcgcctcagctccgaccagttgttcccggtggtttccgtcacctcataatccgctccttcaaaatgaagccacgaataggatgtcgtttcttcactgccttttgttccgtaatgttcaagcccgggagaaagcagaatatattctcccgcttcaacggaaaaggcgttttcgtcttctgtaatgtagaggacgccttctttcacatacagcagatcaaacaccgggaagacccgtctcacatgggtttcgccttttttgaacactccttctcccgcagcgataaagaccgggaacggagggactgtgaactcgagaaaggacatatttccggccctcctttttaagtcggatttttgcaagaagtttcgtttctctccctttttattataagaaaatggaggtacacttttaaacgttgattttttcaggaaaggggttaaaagaaatgaaacaagcgattttaaaacgggctgcattcaaacaatcctctgatcacaaactctcattatacgcgctgacttggccgatatttattgaggtttcattatatatgtttatgggaaacgccgacactcttatgcttagccaatactctgacaacagtgtggcggccgtgggtgtcagcaatcagattttaaatttaattatcgtgatgttcagctttatcgcaacgggtacgacaattgtgatttcacagtttttaggatctaaacagaaaaaagaggcgcaggaagtggcttatgtatcaataggagcgaactttgtcatcagtctcgccatcagcgccgccatattttttgcggccgttccgctgcttcatgtgatgggtctttccaatgaattgatgccggatgccaaagtctttttgcaggtggtcggcgggctgtccttcattcaggctttgattatgacgttcagcgccattttaaaaagctacggtcatacgaaggatacgatgttcgttacgatcgggatgaatattttaaatattggcggaaactttcttgtcattttcgggccgctcggccttccggtgttaggcgtcgccggtgttgcgatgtcaacgtcctttgcgcggatcatcgggctcatcgcgatgattgtgatcgtcaaaaaacgcatcggactcggtctgacatggcaaaagatttttcacgtccataaagagcacttgcggaaactcctgaaaatcgggattccgtctgccggcgaacagctgtcttataacatttcacaaatggttgtcacttattttatcgccattatgggcgctcaggcgcttacaacaaaggtttatacacaaaacatcaccatgtttatcctgctgttcggaacggcgatcagccagggcacacagattttgatcggcagatatatcggcgccaaacggtttgacgacgcttatgaccgctgcatgaaaagtctgtactgggcgcttggcattgccgctttgacatccgtgatcatgaccttgttttcaaagcagctgatcggaattttcacaagcagccctgacattattgcgacggcgagcatgctgatcgccatgacgatcattcttgagcccggccgttcatttaatgtcattatcatcaactcgctgcgggctgccggagatgcaaaattccccgtctacatggcgatgatttccatgtggggtatcggactgcctctcgcttatctgttcggcatccatttcggattggggcttatgggcatctggatttcatttatcgcggatgaatgggtcagaggcattcttatgtacagaagatggcggtcgcggatttggattcaaaaagggattgcataaacgccccgagcttcgttaagaagccgggcgtttttttatgcctgcgaaagccgttttctcatgtcaccgagctctgaccggtaatgtgccagcaaaccggtaacggcgggtcttgagtataacggaaacagctccagctcttcagacgcctcctcgaaatacgcctcggcctcgaatgcgatgtactcccatacattcataaaagctttgttgacggtatggctctccagctcttcttccgtatagccgaattgcatcatcacctggcgcgggagacgctttttcgaccactcatccgtatggaccctcagaagcacccgggtcagctgaatggctgctcctaatgaaacggctgcatggcggagtttctcttggttccggcgcgcgcaaaccggcagcagaagcaggccgagggctccgcctgtttggcccgcgtacatcagcaggtcatcaaactcttgatacgttactttttctctgtcagagatgtggccggcgataaactcacgcaacggctcttcttcaagtgcaaattgctgccgcacatcagtgagcgcctcccacaaaaagccgtcggcgcgtgccccgttcagaaagtcttgtgccgcctgttcaaatcccccaagttcctgcatatcaagccgatcagcttcgtgaaacaaagcaagcaccgcccatgcggcccgcctgttttttggcggcagggatgagaaagtccgtttatataaaggaaagtgcacctcggcaagatgggcgcatgtttcgtattcggtcatggtatcactcctctgttttttagtgtaccatatgtttcacaataaaaagaccgatatccttcagcggaaaccggtcgcggcactgttattcttctatatcgatacggtacgcctcaaaccatgtatggatctgggcaagatgggcgatcagctgcgggcctttcatcagctggccgaaccacggcacctgaaaagatgaaccttctgtctccagcagcatttccagcttctttctgtcaagcagggtgtgaagcacggaatctttctgttgtaaaatcgttttcagccattctgtgaccccctgcgtgtatttcgggtgatgcgttttcggataagggctttttttgcggtacaaaatatcttcaggaagcagtccttcaagcgctttccgcaaaatgcctttttcccggctgccatgcattttcatttcccaaggaatattccaaacgtattccacaagtctgtggtcggcgaacggcacccgtacttcaagacttgcgcccatgctcatgcggtctttgcggtcgagcagattggtcataaaccaaagcatatttaagtagaacagctgccgtctcgctttatctgttcccgtctcaccgtctaacagcggcgtttccgcaatggtttcttcatatctcgcattcacgtattctctaagattcagccgtttttgccacttttcatccaagagcgtgaccctctcctcagtcgacctcatccaaggaaatccgtcttcttctgccgcggtgtgaaaccacggatatccgccgaaaatttcgtccgcgcattctccggaaaggctcacgacaaaatcttttttaatttcccggcagaaccataatagcgatgaatcaacatcagccatgcccggcaggtctctgacgagaacggattcctccagatgttcaaccagctgatcctgcgtaatcacgcacttatgatgctgtgtgccgaatgcatttgtcattttatcgatccacgggccgtcatcattcggctgaaaggcgctcgctttaaaaaatttgctgttctcctcataatcaattgaataagtatgaaggggatctcttccttgtttctcaaaatgagcggcggctatcgcggttatcgcgctcgaatcaagcccccctgataaaaacgtgcaaaccggcacgtcagatacgagctggcgtgtcactgcatcctgaaataagtaccgaatgtgagcggcggtttcatcgaagctgtctgtatgcttttcgctctttacattccaataacgccatatggacaaaccgtcctttgagaaagtgaacgcatgggcgggacgcacctcgtgaattcctttaaacaccccgcagcccggagttctggacggcccgagtccgaatacttccgcaagtccgccgctgtctgtgcgggctttcacatcaggatgagcaagaatggctttcaattccgacccaaacagaaaggaagagccgtgttctttataaaaaaacggcttgacgccgagccggtctcttgccccgaagagccgctttcgcttttcatcccagatggcaaaagcgaaaataccgttcaagcggtccacgcactcctcccgccactcaatatagctgtgcagcagcacttctgtatcagaggtcctctcaaaacggtggcccctcgcctgaagctccttccgcaattcctccgtgttatacagctcgccattataaatgatggtgtacgtttcctcttgatgcgtgcaggccatcggctggcggccgccttcaatgtcaacgaccgaaagtcttttatgtccgaataaaacatggggctctccccagacgtttgaatcatcaggccctcgttttgaaagagtgtctatcatattgttcataatatgtttctcttggacgagctgcttttgaaaatcgacccaacccgcaattccacacatgtgatatcagctccaatcccgtttctgtcggtttcaaattcgtttctatcagcactttacccagtttatgcaaagaaacgcagatagttgatttgtcccactaagagttgtatgagacaagcccgatttggaaagaacggaagagaagaaacaaacaaaggagacgggcacggttatgaaacgaaaacagcttttctcagaaaaaaacaaatgggggcgcggcacactgatgatagaggacggcatctgcctcgtcgaaaacgatgaaggcgatatcctgcttgcagacagtctcggaaacgcagacgtattgatgaaacgcgacggcagatggcagccggcacggatttgcggcggttcggccgaaatcggcgcagacaccatccccctgctcggcggggaagaaatccgttatgaaaaggcggtcaaacggccgctgttaaccttgctcgattcgctggacgatgaaacgtttctgctgtttctcagccatctgcacgggttcggcctgtctgtatatgattgcgtattttcctataatcaggcgctgttttccggtgaaggcgtttcgttttatcacttctcggcggatgacgcacaatgcgccctgcagcatcaccgcggcagctcgggtaaacacgacagatttgaatggacggcatctgacgggcggcgctccattatgtattcagcggcaagacaagacggcaccgcgtaacaaacaggcggcaccttttaaataggtgccgcctgatgtattcagctttgtttttcacgctgattgacggccggcgtttgcttttacccttcacagccgtagcttttgcggcaacaagagtgattgacgcttttggcatcctggacatctctttcgcctcatcaacacggcatttctcattcagcggcccagttgcgcaactaaaaaaaacccggatgcatccgggtttttcaagcgattgattaaaatacgtgaaaaccgatcggcaagtgaaggcccagcagcaccgtcaggacgagcacgataataaaaccgatccacagtccgccggttgatttgccttttttcttgcggatgacgagcatttccatcagtccgatggtaatgatgccgagcagcatttttcctgcgtactctccgttccaattcgcaaaacggacaaaaagctcagctccggtcagaataataataatgtagaataagcgcagaatcatatgcgtaatttttgcgcccttcgcttttccggcaccgtacagcccgtagctgacaaacaccaggataagcgcaacgacccatgaagtaatatgccaatgtgtcattatgttcaattccccctatcagatcaatctgcctcatttatggtaccacaacaagccgctcggagcattatcaatcgtgcgaaagacacacaattatccgatttggttcgacagcgtgccgatcggttcaattgtaatgtcaatgcggtcccccggctttaaaaatttcggcggcttaaacccttttccgacaccggacggcgttcccgtcgctataatgtcaccggcttcaagcgtcatcccttttgacagcgtctcaattaattcagctatcggaaaaatcatgtcacccgttgatcctgattggcgcagttctccgttcacccgcgtttcaactttcaggctttgcggatcactgacggccgacttatgtacaatgaccgggcccatcggacatgtcgtatcgaggcttttgccgataaaaaactgtttatgttttttctgcagatcgcgcgctgtgatatcatttacaattgtatagccgaatatatgatcaagcgcatgttctttggagatgtgcgatccgctttttgatatgattaccgcaagctccccttcataatcaagctgctccgttacatccaagtggctgttcactgtttctccgtggcctgtaacggcagccggggctttcgtaaaaaccatgggatgctccggtatatccgcctcactccccatttcaacggcatgatcacgataatttttcccgatgcagatcacgttctttgaaggtctcggaataggcgcgcaaagctttacgtcagacagcgcatacataaatgaacccgactcgtcattcggttttttcgcccattccgcaagctgtccggcatgcgcgacgaacttatctcctttttgaatgcactcgatcagcgaacccggaatcgtctcaagttcaaacaattttttttcagccttttgcagatctaagattttgtcatcatcaataatcagaccgacaaattttcggctgttcagttcccctgttgcaaatttcatgttaatcccccatcatttttaaatggcattcctttatgtattcttcctccgggcgggaaatccctcttttaaacaggctgaaaataagtgtaaaagagtatcaaaaattgtcacttttttagtcatattgacgaaataaaaccttcttggccaaaatgggttatactattatcatcctatgttttccaaaataatcgagaattggagatcacacgatgaacaaaattgaagaaaaaagattaactttattcgagacagcgcaaaaattcggaatcaatgcgacggagaccatcaggtgcagccaggagctggacagccttttaaacgggtgccggggcgggctcatccaacaaacgaaagacagcgggccgaacccggccgcacagattcagcacggccgcgaaagaaaagaggctttctcataaacgtgatatgtatataaatctgtatcatttatgtataagacccggcatctgtaaagcgccggtgttttttacgtctaaagttttttccgctcacaaaaatgtgcatttgtcataagctattttaggcaggcagcccagataagctcctggagtgcagtcatgaaaatcttcacgaaaaggatgtgctcgtatgcccgcaattgtcggagcgtttaaaattaatgccgtcggtacgagcggagtcgttcatataggcgactgcatcaccatttctccaaaagcagaggttaagacatttgccggagcgggcagcttcaataccggagacaatctcacactgacgaattacaggaattcaacgaatgtgtacgataatgatgtaatcgatcagccgatggcaggaaacgcataaaggaggcgccgtatgaatttttacgtcaatcagtcgatccatatcaattacatgcgtgtagaatctgtcagcaattcctccatactgcaaatcggaagcgccggttcaattaaatctctttccaatctgtacaacacagggagttatgttgagccggcgccgcctgtcaccgcggggcagcaggctgtaacaacagggggaggtcccggcacctcatcatttgtaccgctccagccgccaagccggtagttttaatgaaggaaacgagacgcgaggtgaatgtcatgtatgatcaatccgtttcatcctacctgcagaatttaaattctttcgtccagcagcaggcgcagcagattcaggagctcgaacggcagctgaaagaattccaaaatgaaatttcaacgctgaagcagcagccttctacaagaatcgatcggctcgagtataaatttgatcagctgaaaattgaacggctggaaggaacgctgaatatcggattgaatccgactgatccgaatgccgtgcaaaacttcgaagtcggccagacatctccgcaggtcggaatgatgcagcaggaacaggcgggccagcaaatgcagcaaatccgtcaaaacgtcgatatgtacctgaatgaagaaatccccgcgcttttagagcagctcgaaactcagtatgagagcaggctggacgaaacgaacaaatatcatattattgaagatatcagaaagcagatggacagccggattcagtattatctgtcccatgtcccgaaagaagaaaatacggcgcccgcgcaatatgccgagcagattgccgaacatgtgaagcgtgatattgtcagggccgtcgagcactttattaaacacatacctggtgaaatgaaaggtgatgatccgtcatgatttttacagtgattaaccggaatattgaagtcggcgacatccggtctactggtgtatccagttcttccttattattaatcggcgacaccgattccgtctatctgtcttccatctttgacacgcctccggaatctcttattatcgggccttatgtgccgctggcgccggaataatgttaaagcgcatttcacgcctccggaacgccaaaatcaattcagtcgggattgcgagtgtctttcaagcaggcgatacgaatgaaatcaatatgcggatcaaagtattggccgatcagcgcagtcttgctgtatacagagatgatgaaggctcatttaacaaaaaagaataccagatctttcggcagccggccgtcatgccgttaccggaaacgggagtccaaagcgcattctgccatgaaaatccttcaattcgggtaaggaatgtgaaagttcaaggggtatcgtcagcgtccgtggttcaaatcggatcgacgtcggtcgttctgggagattcgcggctgaaacatattaggcagatcttcacgccaagctcacaatcacagcagccctgacatataatgacggtgagacttctataaagggtgtcgtttatgccagcaattaccggacctatagctatcaattccatatcgggcggagtcgtaaactttggtgattccttttacctttctccaaaaagctcttctaaatctgcgctcggttcgggagcaggcaataccggagatttcctgttattaaacaacgttgtcaatgcgacaaactatatagaccccgatgtcagcgatcaaaatgtggtcggaaacgcctaaaaagcagccgctctttcagaagagggctgcttttggttcagcgttattttcgttcatttgctttttttgtttttacaagcttttccggcggctgttttctgatccatttcacaaaccgcgcgagtttcgggtcacgccgcagctcttctattcccgcgagccttgccgcaagctcctgattcgtatagagcgcgtgaacctgtttatgacaagggatgcagagcattgcggtcggaaggaatgtcccgccttcttccttaggcgttaagtggtgctccgtcagccgcacataatggcggccgcataattcacatgtaccctcggcagaatcggccataattccttctcctttctacatgatctccaatgtgacccgggtgcctttcccgcccggttcggacggatgaacgattaattttttcggcagacgcgctctcagctcctgcacatggctgatcactccgacggataagttgtccgattgcagcttttcgagcgctgtgacaacggtgtctaagagcccttggtcaagagtcccgaatccttcatctaagaaaaagaattgcagcgggtattgcccccgcagctgaatctgggcggacaaggccagcgcaagcgacagcgatgtcagaaacgtctccccgccggaaaggcttgatacgggccgtttgacgcctccgttcgcgtcatcacgcatgacgaaaccgccttctgaatcgactaatatggcataccgctgccttgtcagcgctccgagacgggcagaggcgtcccgagccacgctttccagctgttcttccgctaaaaattcgacgaatgtattgcctttacatacagactggagcttatcaagcctgtcaatctgtgtctgccagtttttcagttcggcttcaatctctttaaagcgcttatgctgtttttgcataaccgcgaaggcttttgcctgtgctcctttttcctccatggcggcgcctgactcagcctctgcctgcttcagcagagaaacggatgctgtccattcttcctccgatatccggcgctcggctaatttatcagtaacacggctgatatttgccgatagctgttttgaggtgtccagaaactcatcaatttcttttttcatttcctctgcacgcccttgcggaagcagactttttttaacttggtccggttcggtaaacccggtgtcttttgacctcacgcgccagtcgttttgcgctttctcaagagaggcctcagcatccctgagtgacatgagactccctgattcccggccttttgcgtcattcagcgattgctgcgcctgcttcagcgcatcgaatagggactgttcttttgattttaacagctgtaattcctgccgcaccgcttcaagctttgcggaaattgatgtttcttcagctgctgttccgagctcttgttcatatccgtcaatcacctgctgcaggcgctcagacgcatagtgaagctcgagccgttcccgttcaagccgatgcttcatctcctgcaggcgttctttctcctcttcatgttccttgaggaatgcgatgcttgtttcaatgcgcttctcacattcttctgcctgcctgtccttctcatctatcgaagcctgccaggcgtcaatccggtttggcggaatatgaccgcagacttcgttgtactgattcaatcggctttctgacagcgattcaagctcttctaatgaatgtctgagacggtcggcttctttttcctcgtagcggattcgttcggcaagctgctcagcttgttttaccgtctgctgatgcgcgctgatcagtcttgcgaccttctcttttaccgacagcatatcctgtttcatttgtttccattccaagcggacggcgctgaacgcttcatcaagcgggcgtccgctgatggaagaagcggcttccagctccggaacccgggcgctttgcagaaacggacattcttcggtaaaacgccccgactgttcttctaatgcaaccttggctgtcagcacttcctgagaaagagccgccgcctcagaaagcagtgcttccacctgctgcaaatgttcctgcacagcggtatcaggcgagaatgtttcatgagcggaacgcgggcggtcatgctgcgtcgagccgcatacaggacaaggctttccttcgatcagtttttccgataattcttttgttaatgcagccgttctcgcttcctctgagcgcctgcggagatcggcttgcgttttttcagcccgttcggctgcggctttcagtgaacgttccgtttcacagaccatatggtaaacggtttgcagcgtttgataagcgcgcgtaatgtcttcctcttccgttttcgctttcgctgtgagcgactcgctttctccgttgagcttctccacgtttttcagctgcgttgtcagattggcccgctctttcgtgatttgttcctgtgtctgctgaaagcctgccgccagctgtgctgcggtctggcattttttccgttcatctgcggtcacttgaactgctttcagctcttctttcagctcattctgcctgttttggccgcgggtcaggcggtctttcactgcggccagctgtttcgaggcggcttcgtattcttcctcttttttgctgtgctccgcatttgttttttccgcttcttttttcgcttcaagcagtttttgttcaatggctgaaagtctttgatacagctcttcttccttgacaagtttcggctcctgttcggccttatgggcgcgccatgcttcataggcttcattttgccgggtaaatgaaacggtttccgcctctgatttccgtttggccagttcgtgttcctgttcggctcgctgcttccggcggacggcttcggtgcagcggtctgcgtacggctcaagggcgagagctgtttccgcctctttaagacgctcagtcaaatccgtgatgtacgggcgtctttcctcaagctttttctcccggcgctcatattcatctctttctgtctgcaagttccaaatttcctggtgattttcaaaacgctcttttgcccggacccgtttcttctcagctgcttcaagccgttcgttcgcttcgtgaaactgctgttcagcctgcttcagcgcatcttctcctgcgtctccgaggccggattgttcggccagcatttcattttttttcgctgccgcttcctgcgcccgccgccgcaattttttgacaagcctgtccccgtactgttccagattaaacagacgctggagcatatgtcttctttccgcgcctttaagcgacagaaactcggcaaactttccttgcggcagcacgacggctcttgtaaagtcgtcaatggtcaggccaagaagctcctctacctttttgttcacttcattcgctttatcggccagcaccgtttgttcgtctttgatttcaatcagccggcagagggcggtttttactttcgtttcatccgttctcttaaaaacgcgctcgaccttgtaggaaacccggtggccggattgaagcgcgaatgtaaatgagacggcaagctgatcttcggcatgattcagaatgccgtgcgtattatttgcggcgcgctccacttttccgtataaagcgagtgtcatggcatcaaggatcgacgattttccgcttccggtcggcccgaaaatcccgaacaccccggctcctgacagtccggcaaaatcaatggtctgttcctccctgaagctgtggagcccttttatcgttaacagaatcggcttcatgtcgcatcctcctcatcatctgctgacgcaagctctaaaaacagcttgaccatctcctcatccggcacgccgccgcccgtttgtttttcataaaacttcttaaatcgatcctcaattgatgtgtgtttcacttcaatccggtcattttcggtctctttttcttcaaaaaccggcctgatatggataaagccgggatgcgcctttctcagccgatgaatttcctcgagagaaagctgatccgtcaaatggatatcaagatcgatccaggcattccggtcacgcccttcatcaagccagccgtgaacctcgctcagcccctgcgctttccatttgacgagcggtttaccggaagacaggaaaatctcttcccacttcgcttctccgccgggcttcgcttctaccactgtcaccgatttggcataaccggcttccgaaaagctgtatgcgagcggagagcctgaataacgggcagccgtcttggcgcgcttgatcgtttgcggacggtggagatggccgagagccacgtaagccgcatcagccggcaggctgtcagcggcgaccgtgtaggcgcccccgacttcaatcggacgctctgaatcggtctgatttccccccgcgacataaatgtggctcgccgcgattttcacggcatcgttccggcacagtccgcacatgtgagcaaacgcctctctgattttcacatcgtaatgatcgcgaagaagcttttcctcaaacgtatcagaaagcacttcgtttaatctcgcctctgacggatatgccagcgcggctacggctaacagctcgtccgccgacggcacctcaatatggacgggttctgtccgcggatagccgattaaatgaatgccgcgctcatttgttaacggagaagccgccgccagcctgtcgggattgtcatggtttccggcaatgacgacaaccgggcgttttccgccgtcagaaagcgcggaaagactttcgtaatacaattgttcagcgagcgcaggcgggttgaccgtatcgaatacatcccccgccataatgaccgcatcaatgttttcttccttgacaatggtattcagctcttccagtacttcggcctgctcgctcagccggcttctgccttccagcgttttgccgaggtgccagtcagctgtatgtaaaatgcgcataccgcattcacctcactttttgatagaaaaaaagatccgctccaaaaaggagcttcggatctcgttacagtgtaagaacgtgacctccatcgaagaaatagagcgcacgccctttcactttcgtttttgtaatttgttcaaccgcttttgtatacaattcgatttgtgtttcatatcttttttgcagaatcggagccgcgccttcaaatccattccggaatttcccctctatccgatctgttttatagtccagcaaatagagaccgtccgcagtttcgtagaggcagtcaataatcccttgcacgagcagcggttcaccggccgtttcggcatccttgtacacctcgccggccggaagcgccatactgaacggcacttcccggtcaatccgcagcgccccgagaaggtctttaccgatttcagttccgaaaaaccggacaatttcttctatatcaatggcttcctgctgctcttctgtcagcagctctttttcgtaaagcatccggaccgtccgctctgcttcttcggcagtcggaatgtgcgtcagcggtatgtgctgcatcaccgtatgcatcgccgtccctttttcggcggctgtcagcccttttttcatcataaaaccgggacgcctgtataaaagcgtgtctcctgacggtttgatgagagagcggccgctgtattcatcctcgtactcttgctttctcttcagctcagaaactgactgcttcgttctgatagccgtcagctctcggtacggatattcccatttaagcagacggcgcgcctgatcatcaaatgaaaacgaaccaggaatcggctcgccctgctgtatcgccttgagacgtttgctcttttcttcagcacgttcttttggattctcttccagcaattcactttgctgcagcatccggatgtgaaaacgcgacgggtcgcgcgcgatatcctcagacgaagaaagtcccggcgtcctgtgcgcctccatgtcacggtggcggatgagcgccggcccgataaagtccaaataagatgacgcctgatagcggtcgaattcagaaagaagccaatcagcccggtctgcttgggcctgccatttggccagctgtttttcccggtttttgcaggaaccgacgagaaacagcttttccttcgctctggtcagcgccacatacaatacgcgcaattcttcggataagagctctctgcgcatctttttcttcatcgccacaagcggaagagtcggatagctgattctgagttccggatgaatatacttcgtgccgaaaccgagctctttatcaagcaggtatgatttgttgagatccatcatattaaaacttctgccgagtccagcggtgaaaacgacgggaaattcaagtcctttgctgctgtggatcgtcatcagccgaacgacatcctcctgctcgctgagcgcacgggcggtccccagatcatcgccgcgctcctgcatccgttcaataaaccgcaaaaagcggaataacccgcggaacgccgtcgcttcgtacgagcgcgcccggtcatacaagacgcgcagattggcctggcgctgctttccgccgggcatgccgcctgcatagtcaaaatatccggtatcgcggtatacttcccaaatcagctcagacaccgaatgattcgtcgaaaatgaccgccacttttgcagactgtcataaaaggttctcagtttttgatacagttcatcatgcctgtcaccgttcgctatatatgctttcagcgcttcataaaacggcgcttttttcttttcaaggcgtatcagcgcaagttcattttcgtcacagccgacgatgggcgagcgcagcacggaagcaagcggaatatcctgatacggattatcaatcaccttcaagactgaaagcgccgcagccacctccacggcttcaaagtaacccgacgtcaaattggcgtacaccggaatgccctggtttttcagctcttccattaattgcggcgcccacggcatggagcgcagcaaaatcacgatatcccggtactggatattccggtgtgtttttgttttcccgtcatagaccttaaacggagacgagacaagctttcggatctccccggctatcgctttcgcttcccaatgcacggtttcaaagtcttcggcatcctcggagctgtctgcgtcatcagcgctgtcaatcagcagcagttccgtttttgccgcgtcattcggcggatacgatgcgccgagcttcaatgccgcctgttcatcgtagtccacttcgccgatttttccgcccatcagctgcttaaacaagaaattcgtactgtccaaaatatcggaacggctgcggaaattttggttcaggtcaattttctgccccgcgccttccccgctttctgtaaaccttttatatttcccgagaaacagcagcggctcagcaagtctgaaacggtagatcgattgtttaacgtcgcctaccataaacagatttcccgcctcttcatccccgcttttcacaagctgcaggatagactcctgcacaagattggtatcttgatattcatcaaccagaacttcatgaaactggtcttgataataaacggccgcttcgctcggcacccgccggccttcttcatcaaccgcagttagaatcgccaggcagtaatgttccaaatctgagaaatcaataattgatttttcttgtttcgccgcttcaaatcgttttccgtacgatatcacgagctgaacgagcgtttcgatgacaggcttcatatctgttaaactcttcaagtgatcttgcggacttcttgtaaagtaatcggtctttaacttttcgatcagtttcttcgcgccgtttcgcaaatcggtcgcttcgtccaaaagcgctttgtcaaattcatcaccctttaccggcttcgcccgcttaaatgagactgcggggacccgttcatacagcgcatcgaagtcatgccggcagctgatcagctcttctatctgctgaaggtcatccagaaaattaccagcgcgcggggccggcccgccgggcgcttttgtcagttcaagcgccttctcaagcttttgttttgccccgaagagcgccatttccgcatcttctctcacatactggtaaaacggaagctcttccattttgctttcttccgtcacgtcatacaagcggacaaagctctgcagccacgcttccgggtcaggatgcgaccgggaatactcgtacacccgtttgacaaggtcttgaagatccagatcatgcctgtctgtcgtatatctgtctgcaagctcaaaaaacgcctgattcccttttgcgtattcatcttcaaacagctcatcaagcacttcgtctccgagcaattcgccttccgtctggtcagccatgcgaaaaccggggtcaagatcaatcatataataatattttttaagcacttgcagacagaaagagtgaagcgtcgaaatgctcgcccgatttaatagagagagctgccgtctgatatgcagagatcccggatttttggcgagctctttttctaatgcttcagcgatccgatgcttcatctccgctgctgaggcgtttgtaaaggtcaccacaaggagcctgtcaacatcaacaggatcttcctccgcggttatctttctgatcatccgttccacgagcacggccgttttacctgatccggctgcggcagcgacaagaatatcgcggccggaagaaacgatggcgctccattggtcatccgtccatatgctgtctttcggtttaggaatttgcatcatcatccgcctcctttttcagccaatccagtatggtgccgtctttttccgctttcaggctgcggtattcattttccttaagcgactcatcaaactggcaaaccgatttaaacgcacagtacgtacaaggcgtcttatctttcagcttatacggggtaatggacacaagcccgtccgttatcgcttcgcccgcctgttcaaatgtccgccgcacgtggtctgtcagcagatgaaagtcctgttcgctgaccgccgctgagtcggatcttaaagacccgtcctttttcaaaccggcattgacgatatttgaacgcccttcctccaaagtcgtgtccatcaggctgatcgcctcccggtcaccgaggagaaggcctttcattttaaatttcttgaaaatttcctgctcgatttcatcaagccccatcggcagactggcctgaatcatcggatcatggatatggaaatacaaaacgcctgccggggtcgctttcatgccgagccaatccgcagaatgtgtaatcgataagtcaagatatgtgagcatttgcagagcgagcccgtaatacacctcagccagatcaagccccctgtcgcttgatttataatcaacgattctcagcagcaggccttttgaactttccgctttatccacgcggtcgatccgtccgacgagttccatcgtacagccgtttttcagcgtgaaagtgagcggaggcagcggtccgcttccgccgaaaccgagttcaagaccgaccgggacgaaaccgctcgccttcgcatgctcgcttaatatgccagaaacacgcgtgacgatcttctgcagtttttccttcacgtaaaagtgtctgtttgagctgagcagaatctctttttgcagctttggcgcaagccgttccaccgcttcataggagaaattccggcactgatctttcgtcagatcgcgccattccagcttctgctcacgaagccggtctgaaatcagcttcagactggagtgaaacagctggccgatatccggcgcttccagcttgaaaaactgccgctcttttaattgcagcccgtgagatgcaaaatgagaaaactggcaggcattaaacgcctccatccgggaaacgcttcctttaatatgctcgccgtaaagctggcgcgaaacaggccgttcaagacgcttcgcctcattgcggaaaaataggcttgaaaacagctttttcgcacgctggtgatcagactctttcatcagcacattgtatgcgctccaccatacgtcactgatctcgtactctcttgtccacagcctgagctgacttgccgtatacgtctgagccacctgtttattgacgagatactgaagctgctcttcttcgcttacctgctcgggatcagccgctgacagcttttcctgatgatcgggaaacagctcgccaagcctgtttacaacgattgacggcaggagcgtttttccttccgcatcggcaatcgggtatgacacataaagacggtcagacggactcgacagcgccatatagatgagaaaatgctcatcaagcagccgctcacgccccgcggaagacagctccactccgaccgctttcagccactcccggtcatcatcagacagcacgccgttttcatccgggcgcgccggaagaacgccgtcattggccccgatgacgaatgtgcaggacgtgccgtatattcttgagagatccatattccctacaaatacttggtcaagcgcaggaggaattaaagaaaaatgaagcgattccgttcccgtttcaagcatttgctggaacagcgccaaagatatttcatcttcacccatcatgccggcaaactcctcgagaagctggataacggcatcccacgcctggccgtgctgctgcgcttcgatcatgtttccggcctcttcggcccgctgccttttccggtccagcttcaggggaacatcggtatcttccaaaaagagataaagagcctccgccatgctttgaaccgttttcgcttttttcatccggttctgcagccggataaggggtgcagctatccactctctcgtctcattcagcatgtgttccatctcgatttcctgatccgtctgcgcgaaatcctcatcgagcgatacgaagcgcctgtatacaaaccgctcgccgttcgtccagcgctcccctttaatgccgtaggcgatacagtaattttcaagctgatctacctgctctcttattttctgctccggctgatcaagcgggaataacagttcggttttcgcacagcggaacaccgcttcatatctccagttccccttcacgacatccaggcttgaacggatgaattcaataagcgggtgatgctgcatagaagcttttccgtcaataaaataaggaagcccgtaatcggcaaacacttccttcagcaaatctttataatcttccggctgacggatgagaatcgccatatctttgtaccggtatcctccgtcccggacaagcgattgaatttcccgggcaataccttcgagctcagctcttctgttttgcgcctgcatgacggtaaaagcttcctgtccgccggtatacgcggcggcgggacgcacatcgtactgcgactctatacaggcaagctccggcacatgccgatgccgcttcgtgccatgcagttccttgcaggaaatatcggcattcaattcctttgccgtctgataaagcttatagtatgtgcttcccgtcattctgaacagatcgagctcatccggtgcctgttccgccgaagggctgtccgccgtcagcgagaatgtgacatgttcagcatgcatgatcagctgctccagcacccttaattcctgcggcgtaaattgatagaatccgtcgacgtaaacacgggcgccttttacaacgtccgccaaaggaatctgctgagcgagcagcgtcaaatagtcctccgaatgcagatagtgtccggcgaggcttctttccatctgctgatataaaatgcctaagtcatgaagtttttcagacagcatccgctctccgcgatactctgacgccgttccgctttccgccatgcggcggacgtcttcaggctcaatacagtatcgcttaaactctgtcagcatccgttccacctgctcagtgaatccggctttgtcactcgctttttgatacactttaaaatcgtgcttatgttcttcaatcagtttccttaaaagcatctgcacacccgtcgtcgtcacaaacggacggttcatgcccccggtatgctgaagcacgcgccacgccaaacgcgaaaaactgaacacttgagcgcgtatcatgcctccgatatccggcgttttagcaagctcatattccattaaaaacgtcatttgatccgggactagaaaaatgatcggtttcccgaacggctcccggcgcagttcatcttgaatgctgtcgataatcagcctcgttttcccactccccgatctgcctactaaaaactcaacacccaaattagaagacccctctctttttatctttctacattttatcgaaagttgacgaaaatgaccaatctcatctgctggtaaaaacgggatgactgttttaaaacatatcgtttttgaccaaattaaagaaaaaaaggattaaatatgatgtcagaatatcccgaagtgattgtgcgaacgattctgtcgttcagcattctgtttatcggcgcccgtatactcggaaaacaaaccatttcacagatgacgctttttgatttcattgcggccatctcgctcggcgccatcacagccaatctgtcgtttaatacaaaactgccgattcattttactgtcagtgcttacacgatttttgtggttatcatttatcttgtcgcatatctttctatgaaaaacagaactgccaggggtttctttgcaggcaaaccgaccattatcattcaaaacggaaaaatacttgagcataatatgaaaaagatgcgctataccctcgactacttgaaccagcagcttcgtgaaaatgatgtatttgacatttctcaggttcagactgccatcattgaaacaaacggcagcatgtcagtggaggtcaaaccggaatttgcgcccgttacaagacaggatctcggcatctttgccggacatgaaaagaactttgccgttgagctgattatggacggccggctggtaatgaaaaatctggaagaaaaccacgtatcggaaaaatggctgagagaagaattggataagagaaacctcaaaccggaagacgtcgtatacgctgtgcgcggaagcaacggccggctttttgtcgacacatacgacgaccatattacatcgccgctggatcaagaataaaaatgacatccgcacatgtcacgggctgccgccgtataataccctataaacatccgggggtgagtccaatgcacgagaatttttttcattatacagccatctgcagtgacgattctgtgcttataaaggatctggtaaaatccataaacggtgaatacagcgctgtgatttgctactcaatattagccgaaaaagcgccgaccgcagaaatcagaagacgaatcgaacatatcagagaggaagaagtgcgccacatgcacgctttctcttcactgtatacgtcaattaccggaaaacagttgacgccgaaacagacggagcattgtccgcacacatacagagaaggactgagggcggcgttttatgatgagcagaaaacgaatgatttttatttacaggcatccgatagagcggtgcatccggaagcgaaacggttatttgcccgcacggcatttgacgagcagcgtcatgccgtctggtttttatacgatatggcccactctcctttccaccatacagggggaacggtatcaaactcgccgaacacaagctacaccgaggtaaataccggaaaataacgattcagacgctccccgctgggagtcatagacggcaaaccccgttctttcaacaggagagaatggggtttatttttcgagccgtttttatacttccactaaacaatggataacttcttcattgtatagtcagcaaaaaccctttataataaaataaaccaactggtcggttttaaacgaaccgagccccgctttgccgggacaacgatatgaatgaggcggaaaggatctgtgtgaagtgacaaatacaaaaggcggtgccggaaagagcgaaaagacgaagaacaggctcgtatccgcttcgcgtgacttatttgcaaaaaaaggatattcagaaacatcgattcgggatattttagaggcggccgagatcagtaaaggcaatctttatcaccattttaaaggaaaagagtttctgtttcttcatatcatggaagaggatcaccgcgtgatgatcgagacgtggagggaaatggaagctgatctgaaagatgctgccgaaaagctgacgggctttgcggagctgctcagccggatgagcatcaattacccgcttatgagagcaagtgaagagttttatgcgagtgcgtttacgtcagaggaggtcgtaaagcggctcaacaaaattgatattgaatatgacgatgtgatgagagagatcttagaagaaggaaatcaagacggaagctggtccattcatcatgtcgaatcaaaagtaaaaatcctgctatccgtcttctacggtttagatgtgttatataaaaacgataccattcagcaaagaatcgaattgcaaaaagaagccatctccgtgtttattcacgggtcgatcaacgctgataaactgaatgacagctgacaaaggagaaacaacatgcaaaaaccgatcagagaacaaaaggctgtactcatcatcttattaagcaacatatttattgcgtttttaggcatcggattgatcattcccgttatgccgctgtttatgaatgtgatgcacttgacgggcagcacaatgggataccttgtcgctgccttcgccgtcgcgcaattaattgcatctcccattgcggggagatgggttgaccgtttcggcagaaaaatcatgattctcgccggactgtttttgttcgcattatccgagctgaccttcggattgggcacacatgtctccattttatatttcgcaagggtgctggggggcatcagtgccgcttttatcatgcccgccgttacagcgtatgtcgcagatattacgacggtgcaggaaagatcgaaggcgatgggctatgtatctgccgccatcagcacagggtttatcatcgggcccggcataggaggatttattgccgatcacggcgttcgtatgccgtttttctttgcggcgggaattgcatttatcgcagtgatttcctctgtctttatgctgaaagagccgttaactaaagaagaacgcgcaaagcagatggaaagcgccaaagaatcaaccttcttaaaagatttgaaaaagtcgattcatccaagctacttgatcgcctttatcatcgtttttgttttggcattcgggctgtcggcgtacgaaacggtattcagcttatttacaaaccataaattcggcttcacgccaaaggatatcgccattattattacgttcagctccattgtggcagtcctcattcaagtgctcgcgttcggcagacttgtcaacttcctcggggagaaaaaagtcattcagctttgtctgatcatcggcgctgtgctggctttcgtttctacggtgatgtcagggtttttgcccgtgctcgctgtcacctgcatcattttccttgcgtttgatttactgcgcccggcactgactacttatctatcgaagatcgcaggaaatcagcaggggtttgttgccggtatgaactcaacatacacgagtttgggcaccattttcggcccggctctgggcggtattttatttgatatgaatattcacttcccgtttctgttcgcaggtgtggttttatttctcggtctgggattgacgcttgtgtggaaaggaaaagcgggcgaggtttcggagtagggtgcactcacccatctccggagctttttttatgttttcgataagaaaaatgaatggattatgagaaataattcattatttatttatctcaaaatctatactatagtaatagtaaggttaacgagcttaacaatttaatatgaatgtttcaggaagaagggttttcattgaagaaagacaaacatctccttacggatatctggtttattctcatcagtgcggcaggggggtttcttctttcgcttacagggatgtcgatcgcctggatgctcggaacgcttgccgccggctgcatcctctccatgacgaggcccggctggctgttcatggcgcctgacagaagagggattcaccgcagatggcttgcggcgggacaaatgatcctcggcatcgaactcggccagaaattgaacctgtccgttctgtcggttttacgggagcattggcttccggtaggcttcatgctgattttctctatcgtgatggcgcttgtttccggatatgtgctctttcggttcagccggacggacatgatgacaagctttgtaggaacggcgccgggcggtttatccgccatgccgggtatcgcccaggaagtcggcgcaaacaccgcgattgtaagccttattcagctgacgcgcgtccttttggtcgtcatgacaataccgtttctcgtcattttcttatttaccaaacaaaacggtgcggctcagacatcagccggagccgtttcagcaggagcttcacatccgggccttattcccgtcttgttaacggccggatttattttagctgcctggcttgcaagtaaaggcgcaaaacggctgaaattccccgccccttggctgctcggcagcatgatcggcgttgctgctgcggaaatcggcgtgtccgccttggcgggcaaagacatgctggcctggtggccgccggaagcgaaccagctgtcacaaatttttctcggcgccacaatcggatcaaaaatgtacaaaagcatgttcaccggtgtgacgagagtgctgaccgtcggatttatttcttccgtcggattaatcgccgccatgattctgagcgcggttgcggtttctaaattaacgggcatctccatgattacatctgttctcgccttttctcccggcgggatcgccgagatggcggcgacttcgatcaccctgcacgaagactcgactttcgtcgtcgcggttcaggtcatccggatcgttctcgtcatcgccatgcttccgcccttctatcggctgctgcaccacctttctcagctgaaacgggcacacggcgaaagaggccgggcagaaagaggaacatgatccgaataaaaaaacacgcatccatatgcgtgttttttatttgaacagctctccgccgccatttacagaccgccagtttgctgacagatcacggaacagccgttcagcaaataacagttcttcatctgtatagcggtctaaaaacgccaagagccgctgttttatcaattcatgatattcatgatgaagggaatgcagctctttcccggcaggagtcagccggaaatagacttcttttttattgtcactcagccgggttctgcgcagaaagccggcttccaaaaacttcgcgcagcttctcgacacggtcggctttgtcgtcttcattttttccgctattgacgtgacattgatcggttcatgatctccgatacacgacaaaatgtgaatttccgtcaaggtcaattgtaattttttcccgtttccttcgcggagttcatccatccgtccggccaacgacgccctgatatcctcctgacacctctcctgctcgtgaaaaatatcggtcagcccttcaagaatcatgtgttttgcatggtctggctgtcttctgtccaactgctgagtcacccttccgtattgattgtttcttttactataacgttttgttacataagaaacaatcacacaggcgcataaaaaggttatcagatgaataatccccatctctccaaaccggccagaacggcttcttccgcttcacgtcccgagccgccggctgcccatgccgcatggccgtccggccggattaaaacggtgtggacgtcattccaatcggcacgtgtttcagcaagctccgccctgactgccgccacgctgtccgtatcaataccggcgggaatgctccctcttaatgacagaagcacaaagccgcccttgcggagaaaatcatacagccgggccggccgcccgtcatgaagggtcagttcgatatccggcaggcgttttccgttcagggtatgcggcggcagctccgcatccggttcataatgcagatcaagcgcggatacttttcccgccaataaacggttggactcctgaaaatccagcaaagcggtcatcgtttctcttaatgccatccccgactcggtaaaatccatgagctttatctgcgttttgatattgtgcagcacttcttttcctgtgctgtgcctttcctgatgatagctgtccagaagatgaggcgccgcttttcccttcatttgcgccgccagcttccagccgagattgacggcatcctgaagccccgtattcaggccttggccgcctgcgggaaaatgaatgtgcgccgcatccccggccacaaaaatccggccggagcggtactgctcagcctgacgctcggcattgccgaaccgcgacatccataccggatcactcaatccgaaatcagtgccgcatatccgccgcaggtcttctttcagctcatcttcggtgacccgctcttccttccgcttttgcgggacatgcggagaaacgatgaggacacggaaaagtccgtccgtaagagggataatcacaaccgatccctccagccggcacgttgaaaaaaaggaagattcgggcggatgtttcaaagcggcatcacaaagggttcctgttaagtcggcatcagtgcccgaaaaagcgatgcccgcctgtttccggacaatgctccccgctccgtctgtacccgcggcatataagctgtgaagagtgcggattccgctttcgtcccggaacaccgtctccactccgtcatccgtctgggtgacagccaccgcttccgccccgcggatgatgtctgcgccgagacttgatgcatactcctccaacatccgctccgtttctgcctgtggcagcattaacgaataattctgcttcgtatccagccgagaaaaatccagccgtgtatccagcatggaaaaatggccggaagacaccttcgtccctttttccaagaagcgttccaatatgcctctcatggcaaaaagctcaagtgtgcgcggatgcatgataagcgctttggaatacggcatcgtcttcttcaatcgttcaatgacagtcgttttcactccggccagcgccagttctgatgcaagcataagcccgaccggacctcccccgataatggcagcctgtgttttcatttcatcagccctctttcatatttttgttgcgcgcgtaacaaaaatatgaaaaataaaacacctccttttttgtttcgcgcgtaacaattttcattatagtctttcctccgctttttgacaatcatttccgaaaaaaagacgccgttcacttggcgtctgattcactgatgactccgacaatgtctttatccttaatcggaccgaaatgacggctgtcgaggctgtatatgcggttgtcgccaataacaaagtattgtcccttcggtatgcttttgcgcccggtcgtttccttcagcgtataatcaccagtcacatggctcccggcggacaatgatgactttaacggttttaaaaacggttccgccacccgttttccattcacatacagctgatcctccctgtatgcgattgactcgccggggagcccgatgacacgtttgatcagcactttgcggtgcgggcctttaaacagaacaatatcgaaacggcggatcgttttgtaacgatgggaaaacttgttgaccatcagctcatttccttgtttaaaggtcggattcatgctgattccttcgactttataatcaataaaaatggcattctttaattgtatggccaaaacaacgataagcacgccggctataaaccaaaatcgttttttcaagattcctgtctccctccgtctttctcatgctgactgattctcgtctgtaaacgccgttcgatatgctttccggcataccacagcaccgcgatcaccattatggcgcccgccatcctgaaaggctgtgtaatgagtgcgtgaagatcatacccgataaaactgatcataaagatcataaccattttccccatcgcggctgctgatataaactgcagcgcccccacccgtgacagaccggcaacgatatgaaccgcagcggacggcgtaaaggggaagcaaagtaaaataaacagcggaccgaaaccgtgccgctcaacccagagcatcatccgccttatggtctgatgcctgcggatgaaaccgaaagctcttttctgtccgaaacggcggacggcataaaacatcagcatcgatcctgacgcagacccgagccatgacagaaaaaaaccttcccacaaaccaaatgcattcgtattcgccaccacaaatacaacgagcggcaaaaacggaagaaacgcttcaataaaaggcaatacagccgcagccgccgggccgaaagctctatagctttggaaccattccgtcagctgttcctcagtcaaatatgataaaaaatgctccaacgtttatactccttaacgagtttgtctatccttattctacacattatctccaaaaaacgaaaatgtttacgagattttccgtcttgaaatatcgtgtaagcgagtataaaataagaacaaacgttctcttttttaagaaagaaggagtatttatgcctgacattcggagcggcacccgcgatctcatcgaaaaagggctgtttctgcccatggcggccgccatcctgaaccgggacctcgaagcgcttgattcgtgcccgttcaaattaaaacaaccctataaacagcttatcagctgctctttaaaattagcacaaaaggatttgagtgatgttcgaaaagagttaagaaagcgtaaaattaaaatatacgaagcggaaagagacgaagcatttacgctttatatatgcaccattaacggctatgaagaaaaacaccgttatttcaacccgagaatacgggaacaggtcaccgccttattggaatattacctgtctcttgcgaccatttaaaaagcagccgggcctgcttttccttttcaaaaaataaaattcagactattcacactatacattcgacatgattttctttataatcgggacacgctgttttcaatgaaaaggaggaatgttatgaaactgattcatgttctcgccgccctgccctttttcggaattctcgccggcattccatttgccaaccgggtgacgccttatgttttcggaatgcctttcattctcgcatatgtcgtcatctgggcggtgctgacttccgttctgatggccgccgtttacaaattggacaaagaaaacaaggcgggtgagacggaatgaatgcagcatttcccgtaatggccgccgtgctcctgttttgtgtatatctcggaatccgggcccgaaaaggaaaacatatggaccttgaacaatggacggtgggcggacgcggcttcggcacgatgtttgtctttttattaatggcgggagaaatatacacgacctttacattcctcggcggaagcggatgggcttacggaaaaggaggccccgccttttatattatcgcgtacggctgccttgcctacattttgtcatattggcttctgccagccgtgtggacttacgccaaacaacacaaactgatgtcgcaatcagattttttcatttcaaaatacaacagcccgctcctcggcattctcgtatcgctcgtcggcatcgcatccctcatcccctatctcgtcctgcagctgaaagggctcggattaattgtttcagcaacgtcatacggacagattccgccctccgccgctgtctggatcggcgctgtctccatcacgatttatgtgatgatttcaggaatccacggttcagcgtggatatccgtcgtcaaagatatcatgattttaggcatcgtcctgtatttaggtatttatctgcccattcattattacggcgggtttacggagatgttcaaacaaattgacgccgcaaaacccggttttctcacgctgccggaaaccggacagagcgtttcctggttcagctcaacggttttgctgaccgccctcggcttttatatgtggcctcatacctttgccgcttcctattcggcggagcatccgcgggtgtttcggaaaaacgcgatcatcatgcctctttatcagctcgtcctgctgtttgtcatctttaccggatttgcggcgattctgcaggtgcccggtttaaaaggggcggacacggatctcgccttattaaagctgtctgtgaaaacctttgatccctggtttgtcgggctgatcggatcggcgggcatcctgacggcgcttgtacccggttcaatgatattaatggcctcaagcacgctgttcgccaaaaatgtgtacaaagccattctgcccggcacgactgacgaaaaagtctcacggctcgcaaaatacgccgtacccgttatcgcgctgatttccgtatattttacgctgaaaggcggaaataccatcgtcaccttgcttttaatgggctacagccttgtcacccagcttttccccgccctcttattcagcctgccgaagcggcgtttcatcacaagccacggcgcttttgccggcataacggccggggtcggaacagtggccttcattacgctgaccgaatcaaccgtcggaaccctctttccgtttcttccgcagatcattaaggatatgaatacaggcatcatcgcgctggttctgaacattgccgtcatgtttgccgtcagcgccgcagtcagaaaaaaacaaatcagcgcagccgaaaaggcggcttaatgataaaatagcggtaagacacatgaagggggaaagccgcatgatcatgacaacgaccgaaaccgtcgccggaaaacagattacggaagtaaaaggcttggtgacaagcagtatcgtccagtcccgtcacatcggaaaagatttgcttgcaggcttaaaatctgtcgtcggcggcgaattgaaaagctataccgaaatgctggaagactccaaaaaagcggtgaaagagcggctgatcagagaggcggagcagctcggagcgaacgccatcgtcggcctgcggttcgaactgaccgcaggacagaacacatccgaattaatcggatacggaaccgccgtcaccgccgaatccatttaaaaaaacaagcctctttagagaggcttgtttttttatttctcacatgcgatatagtctttatcccggtcaagtcttttatttgcattataaagcgcttttgatacatacggcttgtactttgttctgccgcccttgtttttcactttcgacgatttggccacgccgcccttatacaccttattcagcgccttacagttttgatacgtttttacctttgttttcgcttctgccgtctgccccgctccgtatgaacaaccgaacaccaggccgaaagacaaaagcacagctgccgtctttttcatttctatcctatcccctttcctgaatcatgttgtatgactgaacatatcatagttcaaataatctccatttacaagataaataggaaaatagttttaatttacgtccgcccgtatatcttttatggaatttttcccaaaaccttttataatatgaattgatagcgctatctgactatgatgataggaggagaaatgatgatgaaaaaagggcttgttgcgggtgttctcactacagccgttctattcggcgcatgtacggcggatattccgggggtgatcagtcccaatacggcggaagcggcgtcccagctcagtaaaggaatcggcggaagggcctatctgaacagcacgggctcagttctcgtcacgaaaattcagcttccaagctcgattcaggtgtcaaatgggacagcctatatttactcaggatttaccggaggcacagaggctgatatcgggcttcagtacagtgacacctatcatgtatggaaaccgatcatgaaagtcggttcaaagggacaaggccaggtccggtatctggaaggagaaagccaattcacttatacgaaaggcttccggcccggcagcaccgtacagctgaccatttacaaaaatctgaacggcaatacccgcgccacatattggggcacgaataatgacggatacaccggccgcatcatctcagaactcgcccaaaccaatgtaggctctgtctcaaaatggaaagcgctcgccaccgtcgcggtcacatcagaggatcagcgcccttacatcaaatcaaacttctcgacagcctttacgaacatcacgatcgacaataaagcagtcacacctgtgattgatacacaggattttgccaaattgacagtgtcaggcagcaccgtcagcatgtctgtcgtcaaataaagaattttgaacgcacgatttctttcatcgtgcgtttcgtaagggtctgccggatacgcaaatcccttatttttcggattacgtttaataaaaaaacagccctcctcagggttgtttttttaacatttctttcattatttccgccaaaacgctgagcagtccgccttatccttgatattaaattgaatcatgcgttcaagcagctcataatacaccggttcagtccattgaattctgaacaaacgggaagtagcgctgtagccggcacgggcaatgtcgtcggcaaaatgcgcaattccagcttcttcgggagaaacacttacatgatgctttgctgccgcaaagccgataataaaggtgccgtgatcggtaaacatcggcgtgttccacttgatctgcggtgttaaacccgggaattgctcagacgtccacgacaggatttcctccattcgcagacgatggtcagggctgtcgatacttgataaatagtctttgaaaacgtccatgtcttcctccttcaacatcacgtccgctaacgccaaaaccccggattttcagctttttctttgatgttaaattcgatgatcttcttaagcagatcatagtgcaccggatcagtccaccgaattctgaacaggcgtgaagaagcgctgtacccggcttgggcgatgtcatcggcaaaatgctccatcgtctctttttcaggtaaaatgctcaaatgattttttgccgcggcaaacataatgatataggtgccgtgatcggtaaatgtcggtttgttccacttgatctgcgcttctaagttcggaaattggtcagccgtccacgacaaaatttcctctgctttgagacggtgatccgggttatcgatttctgatacatattttgcaaacacatccatgcccatctctcctaaaatgaaatatcattactctttacatcatcatagccaacagacggacacgatacaactctatccgggcatgtaaatcgaaaaagcccttcccaaaaggaaagggcccgtccctttacatcacagctttctctaatatctctcccccagctcccgcaaaataaagtcgtagatcattcttgtccgctcttctttcggatacagcatgaattcctgccgcttcgggatatgactgcccatcctgtcctgaaaagtggttctgagataggcggttctgtaaacctgattttcaaaagaatgataggatacttccagttccatcgttttgccgtttgagaacgtgaccgctgtgtcatcaaatgccgtcggttgaaaatctttaacgtgcacatgagatatccagccgcattgaggccttgcagaagaaagtgtagggaataaaaagatgtgatttgaagggtccaccataatcggcggcttgtgagaaattttaatcgcttcatatgttcccgcttttctcccggcatagctggagccaaagtagcggcagcttctgtcgatgatgtgaatcggcttcatgctgacatacagaatgcagtctttttcaatgaccttcgaccccattttaccgtctatttcctcaggcaaaacagcgatggttgaacgatttacttcgtagctttctaagggtgcgtgtgttttctggcacatgatgtgcagcctccaatccttttcttgaaaatttatactaataatctatcatctgtaattggaaaacgacaggttttttttgaatatagctaaaaatcaccttttaaagctgtaatttagtcttaaattactatttaaatattatttttctttttcatttcacctcatttatacaatgatcattttcgttttttcgtcaatttgcaggatatgtcgatatatttccaagtattagttatctaaagattataaaaattaattgatttttccggccgttatccatatactataaaaaaggcattggggggattctttatgaaagagaaaaagtcgtacactgagctcatgaagtcccgcaacacggaaaaagcaaacgaattcgatgtgacaatggccgatatttacattcaaatggtgcttgatgaatccttgtataaacgccggatcgccatgctgacaatgcagattaataaggcgcttgatgataaaaataaagaagcgttcctcacgctttcaaaagaatatgccgctctcaaacagagtgaataagccaatccatatggattggctttttttacattatccgtttacgatggtgccgccgttcacatgaatcgtctgtcccgtgacataggaagaatcatcgcttgctaagtacaaatagctcggcgccacttcaacaggctctcccgggcgctgcatcggcacgtctgagccgaagacttccacttccttcgccgagaagctcgccgggatcagcggcgtccagatcggccccggcgccactgcgtttaccctgatgccctgagtgacaagagattgggaaagagatcttgtaaacgtgacgatcgccccttttgtcgctgaatagtcaatcaatgttttgtggcctttataggcggtaatggaggccgtattaatgattgaacttcctcttttcaggtgagggagcgcggctttcgtcaagtaaaacattgaaaaaatattcgtctgaaacgttctgatgagctggtggctcgtgattttctcaatccccggctgcacgtgctgctcacccgcgttgttgaccaggatgtcaatggaaggaaaggcttggcccgcctggcggatgacatcgttgcaaaaggcttcgtcgccgacatcccctgcgatcagcagacacttcgccccttctttttctacatattgcttcgtctcttcggcatcctgatgctcatcaaagtaaacgatgaccacattagcgccttcctttgcgaataaaacggatacggcgcggccgatcccgctgtctccgcccgtgatgatcgccgttttcccttcaagttttttcgccgctttcggtttgtcaaaaacggggcgcgggtccattacatattcaaagcccggctgccggttttgatgctgcggcggcaaggttttcttcttctgattcgccattttgatcactcctttacattaattactatattatgagtaatttgagcatcttatacgaatttcatgtatgaacagagtcttattggaaaaattaagaatatacaacagaggaggtaaatctgaattgactactttttcaaacgaggaaccggcttcctattggaaagcaacagctgacattccttcctttcccgccctcactgaagatacggaatgtgacgttgcggtgatcggcggaggaattacgggcctgacaacggcatacgaactgacgaaaagaggtttccgtgtcgctgtcattgaagcagaccggattttaaacgggacgaccgcgggcacgaccgcaaaaatcaccgcccagcatgatttcatctatgccgatcttattcagcagatcggcctgaccagcgcaaggctgtatttcgaagcccatctccgcgccatggaagacatgaagcagatcatcaaggacctttcgattgactgcagactgattgaacaagacgcatatctttacaccaatacagaatcaggcgtcaaaaaaatgcgcagtgagcaggaagcttataccaagctcggtattgaacacgagcttgtgaaagaacttcccgtccccgttgattgcaggctcggcctcgccatgaagaatcaggcgcaattccatccgcttttatatggtgcggcgctcgtcaaagagatcgttaaaaacggggcgcggatttttgaacagacggctgcgatcgacataaaaaaagaaccgcagccggaagtggtcacgaaaaacagacacggcatcaagtgcagctacattgtctgcgcttcccactttcctttttatgacggaggcgggctttatgccgccagaatgtatgccagcagatcctacgtactcgcggtaaaaccgaaacaagcgtatccggacgggatgtatctcagcatagacaagccgtccagatcactgcgatacaccgatttgaacggtgaaaaactggtgcttgtcggcggtgaaagccacaaaacaggccaaggaaaagaaatgtccgggcattacgaagcgctgaaacaatttgcggaagacacaatcggagttgaaagcatcccatatcattggtctgcacaagaccttgtcaccattgacaaaattccgttcatcggtccgatctcaggcgatgaagaacatattttggcggcgaccggttttaaaaaatggggcatgacaagctcagcgctcgccgcgaagcttttggctgatcatattcaaaacaaaaagaacccgttttccggcctgtttattccgtcacgcttccacgcagatcccggactgaaaaaactgatttcctataatgccgacgtggccaaacaccttatctcgggcaaacttgagaggccggacgcttcgcctgagagtcttgggcccggggagggaaaaatcgtaacggtaaacggcaaacgggccggcgcctataaagatgaaaaaggctgtctgcatcttgtcgatacgacatgcacccatttaggctgtgaggttgaatggaatgacggcgaacggacgtgggactgtccatgtcacgggtcccggttcacacccgacggcggggttgccgaaggtcccgccatcaagccgctgaaacgtctcacccaagattgactaaaccattctgtacgaatggttttatttttttccgcattaaaatatttttatcagattccttcattcaagttccttccaaaccgataaaaagaaaaagagaatatctgggggaactaatattgttatttaaaaaagaccgcaaaaaagaaacagcatatttttcagaagccgatggaaaaaaacgcatcgcgctttcaaatcaatatgcagatgtccaaaaacagctgaaaatggtcaggctcggaaacgaagaacttcatgtgcttgaagagctgcagccgttaattaaagaacatatctcaacaatcgtcgattccttttaccgaaacctggatcacgaaaaatcattaatgacgatcattaacgaccacagcacggtcgagcgcctgaaaaaaacattacggcgtcatatccatgagatgttcgccggcacaattgatgatgaattcattgaaaaaagacagcgcatcgcttccatccacttgcggatcggccttgaaccgaaatggtatatgggagcgtttcaggatctgcttctgtcgatgatgaacatatatgaagcaaccattccggatttgcatgagcttttaaaagcgatcaaagcgacgacgaaaatattgaatcttgaacagcagctcgtccttgaagcattccagactgaatataactgccagcgtgacgaacaagaggaaaagaaagcccgtcttcatcagaaaatccaggaaacatccggatcactcgctgatttgttttcagaaacgagcagagccgtgcaggagctggtcgataaatctgagggcatttccgaggcgtcaaaagccggcaccgtcacttccgtacatgtcgaagaaaaatcaatcggcgggaaaaaagagcttgaaagccagcagcagcagatgaataaaatcgacgccagccttctgcagattgaagaagaaatggacaagctgaatgacatcgcccagcagatcgaaaaaatcttcggcatcgtgacggggatcgccgagcaaacgaatctcctgtcactcaacgcttcaatagaatccgccagagccggagagcacggcaaagggttcgccgttgtcgcgacggaggtaaggaagctttcagaggatacgaaaaaaaccgtttccaccgtatcagagctcgtgaacaataccaatacacaaatcaacatcgtgtccaaacatattaaagatgtaaacggacttgtaagcgaaacgaaagaaaaaatgacgcagatcaaccgtctgtttgatgacatcgtccaaagcatgaaaacgagcaaagaccagacaggcaaaatcgacgttgatttgcaggcctttctcggcggccttcaagaagtcagccgcgccgtttcccacgttgcatcatccgttgattcacttgttatccttacagaagaataaagataaaccgaccggcctttttcataaagggccggtctttttaatgttaacttaaaatataatagagttgacatatataaagactcgctttattgtataaacatattttgataagctggaggaatacataatgaaattgacagaaatgatgcatattgccgtgtttaccgccattatgggacttttggggctgcttccgccgcttttcttatcctttacgccggttccgattacgctccagacgatcggtgtgctcttatcaggaagcatccttaaaccgaaagcggcatttttaagccaattgctttttttgctgattgtggcatgcggagcgcctctcctttcaggcggaagaggcgggttcggggtttttttcgggccgagcgccggatatctcatcgcatatccgctggcggcattactgctgagcctcagcatccaaggccttcgctcagctgctgtcccccatttgtttatcagacagttcttgttcggcgtgctgtttttgtatgtcatcggcattcccgttcaggcttttataatgcacattgatatcttgactgccgtaaagctcagcctcatctatgtgcccggagatctgcttaaagcggccgcagcctcattcgcagccgtaagaatcagaaaaactcttcaagcaagccggcttttgccgacgaaaggaagctgattttagtcatcatgattacatcatcatattcagatacagccggacaagcgccggaacggatcgcaattcagacagacacagaacagatcacctatcaaacttggaacaggctagtaaaccaaaccgcaaactggcttggcagcctttcagataagccggaaaacattgcaatattactgccgaacggcatcccatttttacaacttttcgcaggggcggcgcatgccggctgcacggcggttccgttagatccccgctcggctgcggcggaactcgcggaccagctgcacatcagcaaaaccgacctcgtcatctgtgaccgccggctgagcggcagactggacggcatcaaaacgcctgtcatcctgtgggatgaatgcgggcctttgatcgaggcggaaaaaacggaaggcacttttatcaaaaacaccggcctgcccttttataccggattcacctcgggatcgaccggtaagccgaaagccttcacccgctctcaccgttcgtggctggagagcttttcttgtacgaaacgtgaattcggcatttcccctgatgacaaagtgctggtaccgggcacgcttcgctcgtcacactttttatacggcgccgtcagcactttgtttatcggcggaaccgtcctccttcaaagaaaattcaatccggccggaatgaaagaccggctcagacaagctgacgttctatataccgttccgacaatgacggacgccctgctctcactagaggcgtttccggatacaccgctcaaggtgatttcttccggtgcagactggcccgcttcgtctaaacaagcgctgtcagagcgctatccccatttacggttgtacgatttttacggaacgtctgagctgagtttcgtggcgttcttatcgcctgaagacagcgcccggaagcctgacgcggcgggccgtccgtttgaaaatgttacaatcgaaatccgccggcccggcggggaacgctgcatgccgggcgaaacggggaagatttttgtgaacagcccgatgaaattttccggatacatcaacggcgcaaaacctgatgattccggctggatgacggttgatgacatgggatatatcgatcgtgaaggctatctttatatcgaaggacgtgaaaacgggatgatcgtatcaggcggcctgaatgtattcccggaagagatagaacgtgtgctcaaccgctgtccgggcgtcagaaaagcggccgtcatcggcattcctgatgattattggggcagcatcgccgttgcggtgatcgacggacatgcaaatgtaaaggaactgaagaaacagtgccgcgagcagctggcggcatataaaatcccgaaaaaatggctgttttcagaaataccggaaacagccggcggaaagatcgcccgtgccgccgtacaaaagcaggcaaaggacatgatggaatggaagctgtaattacggatgcgaagcggacgattttcgcccgggaaaacggcctgttaaaagactgtctccccgaagatttggcagctccgctgatccgacatttgagccggaacatgcccgaagacattgatgaagtcctgatcggaaacgcgacgggccgcggcgggaacctcgcccggctgtcagccttggccgccgggcttcctttgagcgtgtccggtacgaccatcgacaggcagtgcggttccggattggacgccgtgagggtcgcgtgccactttgttaaagccggcgcggggagcacatacatcgcgggaggagcggagagcagcagccgttcccctttctcatcccgggcgcgcttttctcctgaacacatcggcgatcctgatatgggcatagcggccgagtatacggcacaggcttacggcgtaacgagaaagatgcaggatgaatatgcccttctcagctatgaacggagcgtcaaagcgcacgaagacggcttgtaccgccgggaaattctcccctgtcacggattcgccgctgacgaaaacatgctgaaaaagcggaacatggggcctctcatcgcccgcgccaaacccgtctttcagtccggaggctctgtcaccgcggccaacagctgcggaatttctgacggggcggcggcagtttgtgtgatggaagaacaaaaagcgcggtctctcggtttaaagccgggattgcgttttatcggaagcgcggtaagcggcgtccatccgcattatccgtcagcagctccggtttatgccgtcaaaaagcttttgaaggaacgggacctgtcaccggatgatattgatatatacgaaatcaacgaggcgtttgccgtcaaaatatgcgttttttcacagcagcttcaagtgccgtattctaaaataaatgtccggggcggcgctctggccgtcgggcatccgtacggggcttccggagcggcgcttatcacccggcttttttatgaagcaaaaagacgcccggatgcccgctacgcagcagcagcgatcggcagcggaggcggagtcggactggcgcttctctttgaagtgttaacgtaacggcagtataatagatgatatcgataaaaaatgatcggagtggagactttatgactgccgtttgtttagtaagacatggagagactgattggaatgcccaaaagaagcttcaaggcaaatcggatattccgttaaatgcgacgggagagcgtcaggcgaaagaaacaggagagtacttaaaggggtccgaatgggatgtcatcgtctcgagcccgatgaaacgggccagaaaaacagctgacattattaacgggtttttgaatcttcccattgtcgtcatggaagatttcagagaacggagctacggtgatgcggaaggaatgtctttgccggaacggtcgaagcgctacccggataaaaactacccgaacatggagaccgcagaagagctgacagacagaatgcttgccggtttagtgaaagttcaggagcggtttcctgatcaaaaagtactgatcgtcgctcacggcgcagctattcacgccctcttgtccgctatttctgacggtgataccggcatacaaaacgcaaagcttgtcaatgcgtgcctgagcaatatcgaacgaattgaaaataagtggcgcgtcaaagattacaatgtaagcagccacctatcagaatcataacaaaaaggcccgaattagttttgggcctttttggcgagcatttttttctgaagatcatgtaatacggcgtccgcaccgtcaatgctccggcgctccgtccataccgccctgtccgcgcggtaaacgtgtccgttttttacggcagtcagctgtttccagaggtgatttttttcgagttcttcctcaccgtccaatagtacgatgtaatcaggatcgatatgcaaaagctgcccgggcctcattttgatagcgtctgatttcccgccggaatccgtctggaccgcatatgtaaaccctgcgagcgtcaaaagccgggatgtgaaaaaccggtcatcctttacggaaatgctgccatttgcagcgtcaattaataaaatcgtgccgccttctgcatccagctttcttttgatgtcattcagcttttcttcctgagccgacaattgtttctctatgatgccctctttaccgaccgccttttcaatggtaagggcagcatcaaccgcatcctgataatccgcagcttcatttttcaaagcgattgtcggagcgatctttgtcagctcatggtatatccccctgtgcaggcttgagtctgcaatgatgagatcgggttttaacgaagtgatttttttcaaatcgggatgtgacgggggcccgacggacggactgccgtcgtttcgctctttccggttatccgccgcggccgccggctttataccgagatcatggagggtgtcaataaagccctcattcaatacggcgatgcgctgcgggtgcgcagccacatgcgccgtccccagatcatgcctgacggcggtttcatgttcctgttctgagcatgccgttatgaagagaacggataagatcatcagcatactgaaaattggtttcatctgttccccctctttcgtttttccgcaattatatcattgacaatataagtatcaatgatattcattatcattatttttataaaatggtttcacagcttttctccctcaagaaagtcaaagactgattcatgccggccgctttatttcattccgctttcgtttccatcagacttctgcattcaacaaaaggtgacatttatcctgtttttgcctcagcttccaaaaatggaatcaaaccgttcgacccagtaaacaagagagcgattgcggctgtgtacaaatactcatgtccttccatcggttttttccattaaaatttaaatatttcgggttcctattaaacgaaagagagatgatatacctaaatagaaataaaacaaactgaaaaaaattgggtctactaaaatattattccatactatacaattaatccacagaataatctgtctattggttattctgcaaatgaaaaaaggagtggataaagagtgagaggcaaaaaggtatggatcagtttgctgtttgctttagcgttaatctttacgatggcgttcggcagcacgacttctgcccaggctgcagggaaatcaaacggggaaaagaaatatattgtcggatttaagcagacaatgagcacgatgagcgccgccaagaaaaaagatgtcatttctgaaaaaggcgggaaagtggaaaagcaattcaaatatgtagacgcagcttcagctacattaaatgaaaaagctgtaaaagagctgaaaaaagaccctagcgtcgcttacgttgaagaagatcacgttgcacaggcgtacgcgcagtccgtgccttacggcgtatcacagattaaagcccctgcactgcactctcaaggcttcaccggatcaaatgttaaagtagcggttatcgacagcggtatcgattcttctcatcctgatttaaaggtagcaggcggagccagcatggttccttctgaaacaaatcctttccaagataacaactctcacggaactcacgttgccggtacagttgcagctcttaataactcagtcggtgtattaggcgttgcgccaagcgcatctctttacgctgtaaaagttctcggcgctgacggttccggccagtacagctggatcattaacggaattgagtgggcgatcgcaaacaatatggacgttattaacatgagcctcggcggaccttctggttctgcagcgttaaaagcggcagttgacaaagccgttgcttccggcgtcgtagtggttgcggcagccggtaacgaaggcacttccggcggctcaagcacagtgggctaccctggtaaatacccttctgtcattgcggtaggcgctgttaacagcagcaaccaaagagcatctttctcaagcgtaggttctgagcttgatgtcatggcaccaggcgtctctatccaaagcacgcttcctggaaacaaatacggagcgtacaatggtacgtcaatggcatctccgcacgttgccggagcggctgctttgattctttctaagcacccgaactggacaaacactcaagtccgcagcagtttagaaaacaccactacaaaacttggtgatgctttctactatggaaaagggctgatcaacgtacaggcggcagctcagtaaaacataaaaaaccggcgtcggccatggccccgccggtttttttattatttttcttcctccgcatgttcaatccgctccatgatcgacgggtggctccctctgaaaattttgacgagaaacggcgggttgacccggctcagtcccgtatcggccaagtcctgaaacgtctcaatcgccgcttcccggtttccggtcagctcgatgccgtaacggtcggcggcgttttcctgataccgggagacggcgttcgtaatcggatcagaagcaaaactgagaacggatatgagcagcaataacagcgggagggcggccagatcttcaggcccctttatatgaagcattcggccgaagaatttggacagccgcttataaagcttgtcaatgatataaaacccggctaatgacagcagcagatacccggccagtccgatgtacacgtgcttcatcacatagtgccccatctcatgccccataatgaacaaaatttcccgatccttcagtttgttaagcgtcgtatcccacaaaacgatccgcttattcgaaccgatgcccgtcacatacgcattcagcgcattcgttttctccgacatatttacttcatacacatggctggccggaatgtcggccttgtcggcaagcgacaaaattttgctttccagctccttgtctttcagcggatagaaatcattgtataaaggatcaatcacgaccggctgcaggaaaaacaaaaacagggtaaacggcacagtaagacaccaagcgtaaaaccaccatttttttgtatgctttgtgatcagccagtaaaacacaagcacacacacggcaaacagcggaaaactgatccagaaatcaatgacatggtctcttatccagcttgctgctgtctgcgtcgaaatatgatacgcaagcgaaacccgatatccgatccactcaagcggaagcgaagccgccgtaacgatgagtgaaatcacaaatacgaagcttacgatttgcagcacccgaaagcgcaccgctgcttccagccaatgctttattttttttgcaagccccgtaatgagcagcagaaaaaataaaaaccaatctaacggcgctccgatgaaaaataaaaaatcctttacatttgaaaagttttcagcggctgccaggcggcccgggtccatgaacgaggacggatcggctttcgttccctttacggcctccgggacggcggagtctcctgtcataaagaaataccaatagaaaaaaaggccgtacagcacataggcaagtcccgctgccgctatccatttgcgcatggaagtctccctccttagccttatgacttactcctattgtaagcataaatgcaaataaatagaaccaagcctccgaaacggatgttaatcttttcacaacagaaaagaatggaacaacaggaagcgggaaagactaaaagacggagtgatgaatatgaaaaaaataatcgcgtttattgtagtaatcgcccttttggttattgctttcttctatgtatacagccggaccggcgatgtgtttccatcaagcaacgcagatctgattattctgtcagagaacggaaaaaaagaaatcaaaattaaagacaggcagaatgtaaaagatatgctcgatatcttgaaccaaggaaaacaagtcaaactgaccaaaagcgtgtctcccgattacgacggaacggtcaaataccatgaagaccgttttgattcattcagtatgtggctcgaaagcggcaattatatgatgtacaagcataaaaacacgtattacaaactgacccggcatgatacgaagcttgtgcaaagcatcattaaggaagaatcgcacagctgaccggatcagcatgtaaaagcgaagcccccggcttcgcttttcgtccgtcatttcggaagcatgtcccggaccgcccttctcagcagcttcccggtcgcgttcttcggaatctcatcaagaaaaaccacttccgccggccgcttatattttgccaaatgtgtttcacagtaatcgaaaaccgcctgctctgtcagctcaccgtccgcaggcactatataagcatgcaccgcttcccccgttttggcgtcaggaacgccgatgaccacggcttctttaatgccctcatggctgtagagcacttcttctacttcgcgcggatagacattgtatccgccgacgagaatcatatctttttttctgtcgacgatataaaaataaccgtcttcgtcgcgcttcgccaaatcacccgtgtacagccagccgtctttcagcgcgtgctccgtctcctcgggcatcttgtaatagcctttcatcacattcggccctttcacgatcaattctcccacttgatggtcgggcaattcgcgtccgagcgtatcgacgactttattttcgacatgtaaaatattcgtcccgatcgagccgggctttctcccccggtcaaacggattaaaacaagtaaccggagacgcttcagaaagtccgtatccctccagaatggtgacgtcaaaggtttgttcaaacgtctgcaacagagcgaccggcatggaggccccgcctgaaatgcacagtctgacggacgcaaaatcctccgccttgccgtgctcgtattgatacagatagttatacatcgtcggaacgccggcaaaaatggttgcctgacggcttttaatcagtttaaacacagaagccgggctgaattgcggctcgattaagacacacgctccgctcatcagaggcgcattcatacaaacggttaaacaaaaaacgtgaaacatcggcaatgccgccacaattttgtctttctcattcattcctaagtatccggcgacatcatttgcattggagaaaagattctgatgggtgagcatggcgcctttcggttttccggtcgtccctgaggtgtataaaatgacggcagtatcgtctttggacaatgtcggataagttctgctgcgctccgccgggcggagcatttttgtaaacgttgtcatttttaagcgcaattgagggtcttctgtcgatggagcgttctctgctgtctggctgataatgatatgctccagcagcggcagcgagccgtgcaggctttcaaatacgggaattaataggtcgatgccggcgatcgctttgacatcgccgtttttcagcatgtatgcgatttctgaaggtgtgtatgccggattaacaggtatgacgacaattcccgcttttaacgcgccgaaaaacgcaataacaaaatcaggcgtatttccgagcagcagcgcgagatgatccccttttttcagtcccctgtcctccaagccgtttgcaaatgctttgattttacctgccagctcctcatacgtcatgtactgatcttgaaacagacaagctggtttttccggtttctgcgatgccgtttcttccaatttggaaaccagattcattttcccacccctttaaaaatataatgaatgaatagtcattcatttatccggaataaacgttcacttttattatagaaaaatatagaaaaacactcaagggcaaaaagccccgagtgccgtaaaaccggaaactataattgtttcagcgcttcactgaccggcgtgccgcccgctgtcagatcgaacgctttttcatacgtattcggttcatcaagggatgcgataacggtcttggcgacatcgtctcttgaaatggagcctctttctaaatcggctgcggctttgatatttcccgtgccgggatcatttaataacccgcccggccggataatcgtatacgtcagaccgctcgcttcaagaattttatccgcataatgctttgcggcataatacggcttcagcgcttcattccaattgtcgcggttatgagcctgaagggcgcttaccataatgaaccgcttgatgccggccttctttgccgcttctatcgctttcgccgctccgtcaagatcaatcagaagcgtcttatcgtatccggtgcttcctcctgatccggcggtaaacacaatcgcgtcacagccttcagcggctttcgcgatgtcttccgtgcttccttccaaatctgcaagaacggcttctgttcccgcggcttgaagcgcttctttctgctcttctttccggaccatcgcccgcagcgtatgcgtgccgtctttttgaaacagcccggtcagacgctgtccgatctgcccgtttgctccgatgagaaatactttcatcatgatccctccccattcattatggttctatcatttcacaaaaacgggcgcagattcaaatcatgcgttcggcaaatgttctaataaatcagctcgaggaaatcttccagctctattttgccgaaatactgtttcagatcgattccggccagcgcctccctgatagcggttctgtcatactgttttccggtcagcgcctgttcgacttcactcacatctttcgcaccgaagaaatcaccgaaaattttgcagtcctgaatgattccttttttcacttcaagacgcagatcaatcgatccgaccggataacgtttcgaatgctgaaggttgaatgcgggcgaccttccgaaattccagtcccagttttgatagcgctcttcggaaatcttccggatcgctttccagtcttcatcggtcagtttatattccggcacttcggaaagatcatttgtattaaaaatatggtgaagcagatgttttttgaattcgtccgccgtcattttgtcatcaagaaactcgctgatgttggcgacacggcttctgattgacttaatgccttttgattcaattttgtcttttttcacttttaaggctgacacgacatgatcaatggcggaatccagcattaatgttccgtggctgaaaatacgccctttcgtcgaaaattgagcgttgccggaaatttttctgccgtccgcgacgatgtcgtttcggccgcttaattcagcttccacaccgagctggcgcagcgcctgaataacgggttcggtgaattttttaaaattgtggaagctgtcgccgtcatccttggtgataaaactgaaattcagattcccgaggtcatggtaaaccgcgccgcctcctgacagcctgcggacgacgatgattccgttatcttctacgtatttcgtattgatttcttctattgtgttttggttcttcccgatgataatcgacggctgattgacataaaacagcaggtatgtctgttcagggtcgagatgcttcacgcaatattcctcgattgcgaggttgatcctcgggtcggttatgttttggttgtcgataaataacatggtgctcctcctttatttctcccacttcaatccggaagcggcgattgtcacttcgcccccgaacacggattccgcttcttctttcagcttccggtgctcgccgaaatgaggcagatgtgtgagaatcagctcccccgctccggcctcctccgcgatacgtccggcttccaaactgttcatatggccggctgacgtgccgtcctggtccgcgtaaaaattgcactcgcagatcagcagatcggcattttccgcaaacgggataaacgcgtcctggtagcttgaatcagccgtatacacaacagaagctgaaccgtcagtaatccgcatcgcataacaagtgaccggatgcaccgttttcaggaaggtaatggtgaacggcccggcagaaagcgggcggtccggctgataggccactcctttcgtatgcgttttatatgtaagacgctcaaactgttctatatcagcatcatgcccgtaaatcggcagtgcatgcgtcccttttccgagaaaggagccgacctgtttggcaaattgaagcggcccgatatcagcgatgtgatcatggtgataatgggacaaaatgacggcatcaagctcttctgccggaacataggcaaacagctttgataatacggcgcttccgcaatcgacgagcagagaatagccgccggactgaaacagatagcctgaagttgcttcgtttgcggccggaaacccgccgcagcatccaataactgtaactttcatatgaccctccgaatgtttatgataaaaagatcctttcctccaatatacctatttttcgtacaaattgcatgttttaaacattgtgccaaaacagccgttgattttccaaaactgttataatacaatgtagagacaaaacaatgaaagagggatgggtatgttggaaaagatgtcggattttttcagaaatttacccggtaagaaatgcgaagaatgcggaaatgagattgttgagcagtatgagtgtcacattaatctgtgcaatgactgcttgaaaattaaggatatgtgacaatagggcgccgcacaattctaagttgtgcggcgcccgttttttcggccgtcatcatactttctgaatagggcgttattcaccattattagcaattatctgtacgttttaaaagattcagtattttcaatctatatttttctatagacggattgttttcttttctattataatttgttctaatagctatctttttagatacttattgcacttttttcttcgggaggtaatctatgaaaaaattacgctttggactagcgacgcaaattttcgtcggactcatactaggggttgtagtcggtgtcatctggtacggcaatcccgccattccaacatatttacagcctatcggcgatttgtttttacgcttaatcaaaatgatagtgattccaattgtcgtctccagcttaatcatcggcgttgccggcgcgggaagcggaaaacaagtcggaaaattaggcttcaaaacgattttgtattttgagatcattaccacttttgccattattctcgggctggctttggcgaatctgtttcatccgggaacaggcgttaatatacatgaagctcaaaagacagatatcagtcaatatgttgaaacagaaaaagaacaaaataacaaatctatcgcagacacattcctgcatatcgtaccgacaaacttcttccaatcattagccgaaggagatctgcttgccatcatctgctttaccgtgctgtttgcactcggcatctcggcaatcggtgaaaaaggaaagcctgtcttggccttctttgaaggtgtttctcatgcgatgttccatgttgtgaacctcgtcatgaaagttgcgccgtttggtgtttttgcgttgattggtgttaccgtttccaaatttgggctcagttccctgctttcactcggtaaactggtcggtttagtgtatgtagctttggctttctttctcattgttgtattcggaatcgtcggaaagcttgccggagtaaacattttcaaattcctcgcctatatgaaggatgaaattttattagcgttcagtacgtcaagctccgaaaccgtactcccccgcgttatggaaaaaatggagaagatcggctgtccgaaaggtattgtttcctttgttgtgccgatcggatatacctttaacttagacggatctgtgctgtaccaatctatcgccgctttattcctcgctcaggtataccacattgacttgtccatttggcagcagattacccttgtgcttgtcttgatggtcacttccaaaggaatggctgccgtgcccgggacttctttcgtcgtcctgcttgcgacattaggcgcattcaacattcctgcagaaggccttgcattcatcgccggtgttgaccggattatggacatggcccgcacggtcgtcaatctgaccggaaacgcgctggcatccgttgtgatgtcaaaatgggaaggccagtatgatcccgttaaaggcgcgaaggtcatgagcctcgccaaaacagaacaaaacacaaccatttcaggttaaaatgaaaaccctgcacggaatgatttccgcgcagggttttttatgccatcggcgatagaacgtaccggtgcaaaagcttcgccgtattaagaagcgataattcatgcgtgcgttcaaaagcgtgtgaagcgtcaattcccgggccgatcagcccgtgaacgatgtcatggcccgaacggatggctgctgaggcatcagaaccgtaatacggataaatatcaagctgataatcaatgccatagcgctccgcaagcccggccagatgttttctgagctgataatggtacggtccgctcgcatccttcacgcaaatggagacggtatattcatccgtagactggccgtcgccgatcgctcccatatcaacagccaagtattcgacggtctcaggaggaatgttggaattgccgccgtagccgatttcttcattattagaaatcagaaaatgcgtcgtatacggaagttcgattttctcttccgtgatgcggcggattaaattcaagagcagagccacgctcgctttgtcatcaagatgccgggacttaataaagccgctcggcgtaatctgcacgcgcgggtcaaatgagatgaaatcgccgaccctgatgccgagatcggacgtctcttccttcgtccggacaggctcatcaaggcggacttccatattctcctgattccgctctgccttgccggcgtccttgtagacgtgcactgaagtctgatgcattaagatggtgcctgtataggttttgccggaagaagtttggatctcgcaatattccccttcaatcgagtgatatcggaagccgccgatcaagtcaatcttcagccggccgtccgactttatttcctttaccatcgcgccgagcgtatcgacatgcgccgtcagcaatctgtgtttcttgtcatcacggccgggaattgtgacaaaaagaccgcctttgcggtttctgtaagaggagacgccccattcttttaaaagactttctgtataggcgacaacctcgtatgtattgcccgtcggactcggaatcgacaccagttctttaatcagttccatcgtatgtttcatattttccacaggtcattcctcctatcaattttattcttcttaaaatatactcttttgatccataacccgtccaatcttttcctgctcttttttcatagaatgaagggagcatgagcataggagggaaatgtatgatcagccgtaaaccgcacaagcggaaaaggtttcataatgattggtttgaggattggtttgaggatgattggtctggtgcagccttctggtgctgtaaaaaagaaaaagatcactgtaaaaagaaaaaagaagacccttgtaaaaagaagaaagacaaaaagaagaaagacaaaaagaagcatcatcattcatgccgccgctgctgccgtcattggtaatcgttcacacaagcccgttttacaaataaaattctcatgctccccaaacagcggatgctgcttgggtttttttattaaaattagtaccaagtaataatatcaggtgttataatctgatataaaggagtgattttttcatgtcaaaatctaaaattacagcaatcggtacatatgctccggcacgccgattaacaaacgcggatttagagcgcatcgtcgatacatctgatgaatggatcgtccagcgcaccggtatgaaggaaagacgcattgccggcgaacatgaattcacatcggatttgtgtgtggaagcggtgaaaaaccttgcagaacgatacagcggaactcttgatgatgtcgatatgattcttgtcgccacaacgacggcggactatgcgtttccaagcaccgcggcacgcgtgcaggcttacttcggctggccgcacacgggagcgcttgatattaacgccacatgcgccggactcacttacggccttcagctcgcagacgcattaattaccgccggttcccatcaaaaagtgattgtcattgccggtgaaacattatcaaaggtaacggattatactgaccggacgacctgcgttcttttcggagatgctgcaggcgccctattggtggaacgcgacgaatcagcgccgggctttttggcagccgtgcaaggaacagcgggaggaagcgcggacgtgctgtatcgcacgggactgagcgcagaattaaacggcgagccgcttaaaggcggaggaaatatggtgcaaaacgggcgcgaagtatataaatgggcggccagaaccgtgcctgaggaatgcaatgcccttttagaaaaagccggcttttcaaaagacgatctggattggttcgttcctcacagcgccaacatgcggatgatcgaatccatctgtgaaaaactgcccttcccgcttgaacggacattgacaagcgttgaatattacggcaacacttcatcggtttctattattctcgctttggatgaagctgtgaaagcaaaaaaactgtcggaaggccagacgctggtattgttcggattcggcggcggattgacgtataccggacttttggtgagatggggattttaatcgaaatcaaaaaaaagaggccctgagcatctgctcagcgcctctttttcttatgctgttatttcttcttccgttttgtgttcttttttgctttgcaccgtaaaatacacgatggtcagcgcgatcatgacaacggcgatgcccaacagaatggatgcctgctgccacatatagccgtaatcgccatttgaaatgacggcacggaacccgttgatgctgtaagtcatcggcagtgccccgtgaatcacttgatagaatcccggcaggagttcaagcgggaaggttcctccgcttgccccaagctggagcaccagaatgatgacagcgataaagcgtcccggatttcccatcgttgtcgccaataattgaatcatcgacaggaacgcgatgctggtaatcatcgtaaagagatagaatctccaagtgctttccacatcaagcccgattccttttaacagaaccgtggcgactataacggattgaatcagtccgacgagcagaatgacgctgaatttgctgaggaaccattcaaaaccgtttctcggacgccctgaagcttcactcagagggaatacgaccgtcagcatcaatccgccgacatacaagcccatagagagaatataaggcgtcagtccggtaccgtagttaggcacggaatgaatcgcgttatcgtccgtttttaccggatcggcaaacatgctgtacgttttgtcatctgtcttaatgtccccggtttgatcagccgcatctttcagctggctggacaattgtccggtgccgtctaaaagcttgcttaaaccggtgccgagagacgcttgaccctgctcaattttggacgagccgtcatggattttgttttgcgcgtccagcagtttcgttaagccgccagacacctggccgctccctgacactaacgcttctgatcctgatttgagctgtccgaacttgctgttgtattcgccgataccggccgtcaatttgttttggctttcaaagacggtctgcgctccgctgtacaatttatcagttccagccgtcagctggttaatcgcgtcttgtaccgccgccgcgccgttatacagtttcgatgtggactgaggcagtgctttcagctgatcagccttcgcttttacatctgccagcgcgctttttatgactgacatatccggaagctggatatctccgccggacggaagctggctgacgatattgtctaaatccggaaggtcggccttcggaagcttctcattcagaagctgaacaagtttcgctttttgctcatccgttaagaaatcactgtccttaatcacctttttgaccgcgtcatcccgggcatccaggctgtttttcagatcagaaagctttttcttaaactgctgcaattccttttcagtctgctcaagctccccaaccgctttttcaatatctgagaggttgactgaattgatcgcatcttcaaatgccgccgctttttgcgacacttcctgcgccttgctgtttaacgcgcttaatccattcgttaaatccggaagcttttgctggagctgcttttgtgcgtcaaggctcgttttcagcccgctggccacttggcctcctcctgaagcaatctgccctgatttatcttgaatttcggcgcttgcgctctgaagttttgcgatagagctgtcaagcgtttgaattccgcttgtcactttcgccgctccgtctgcaagctgctgcgttttatcgccgatggtggcggtgctttcagtaagcttcgctaaattttccttcagcttggcgctgccgtctttcgcgtttttcgtgccgtcgtctattttcttggcgccgctgctggctttgccgagtcctttggcaatatctttaaaattgtcaaaaatgacttttgcgtattgctccgtcacttctttcgacacggaggctttcagcttgtcgatcgccttttcgccgattgtcgcgccgacatagtttgatccggcattcgtatgatatttcagatccagcttcttcggatttttatccattaccgtgctggcgtttttagaaaaatcttcaggaatctcgaccaataaataatatttagcatttaataagtcctttaacgattgatcaagatcgtttgaaaaatgccaatcaaaattatcatttttctttaactctttcacaagatcgtcaccgatctgaagatgtttcccttcgtagtccgcccctttatcctggttgacaacgacaaccggcagctgatccaccgtgccgtacgggtcccagtacgccttcaaaaacactccgctgtagatcagcggaacgaataatatggcaatgatggggattaacagtttcttgttcgttacaatgtctttccactggctttttattgtattcaaccctgttgcctccttccgcaaactgactcatttgacaaaacggtcacggcacctaaaaagtgaaggatcatctattatttagataatccttgaccaacatacatttccagcaattcggcgatcgtctctttttcaagaggcggatggtttttttcccagtcaaatatcagcgcgatgtagagcttgagcatcacaaaagcggtcagttccggatcacacggtttaatgcttccgttttcaatggctgtttctatcttttctttaatgtatgacagaatggcccgctccattttcgcaatgacatcctgaacggctattgtaccaatctcggcgttctcctgaaaaattttaatagtcagctggtgtgtttttctgaattccaaaatcgcgacaagcgcccggtgaacattttcgtgaaatgaaagctccggtttcatcgcttcgtctgcgtgttccttcatttctcttaaaatagtggtgaaaatatcatcaaacagttcttctttgtttttgaaaaacgtgtagatggttcccttccccacatttgcaagctttgccaccagatccattgtcgttgctttgtagccgaattgtgtaaaagacttcgttgccgcttccagaatgagctttttccgatcgacggacatgtttcccacctcgttaaattgaccgtttgaacgttttagtcattttgtacataagataacttatcacagtcgcaaagaagattcaaatgttttttctctttattggtgttccctttacagaacgggaacatgcaaaaaacctccgttttacgataacggaggctggtacgtttcaaataaataagcgagtgaatcatatacggcggcttttccctggtcgatacagtcggggatgcccaccccttcgaaagacgcgcccgtcgcgtatacgcccggataggaagctttcagcgcatctctgaactctttgatgcgctccttatggccgacatggtattgcggcatgctttcgttccagcgggtcacacaggtcatttccggttcgccatttattttcattacttttttcaaatcttccattacgattttaatgatctcgttatctgaaagatctacgatggattcatctccggcctttccgacgtacgccctgagaagtgttttgccctccggcgccgcgtgcggccattttttattcgtccatgtgcaggccgtgatggagaaatcgctgtttcttgagataacgaatcccgtaccttcatgctccattttgacggctccctcaggaaaacctaaggcgacgttggcaacggacgtagaatgcatatctttgagacatgaaaccgccggcagatcagaaagcattttcgccgcggctttatgcggggctgtcactatgcatccttccgcatagagcactttgccattatcaagcgtcacggaatatcctttctcctcgcggccgatatgggtgactttcgttcctttcatcacctttgtcagcgtaagctgcttttccagctcctccaccaacgtttgaagtcctgtcgtcaccgttaaaaactggccctgctttttggccgtcagctgctgtcccgaaggctgcggacgtgattttttcataccgagaatcaggcttctgtgcttttgctcagtctgatagaattgcggaaacgtggacatgaggctcagcttatcaatatctccggcataaatccctgataatagcggttctattaaattctcaacgacttcgtcaccgacgcgtctgcggaaaaattcacccagagactgatcttccttcggtttgctcgcaggcaggacaaagtcaagcgccgcccgcgcttttccgggtacagaaaataaaccggtggagatgaacggagcgattttggtcggaatgcccatcaccgcgcccttcggcatcggatgaagcgtctcattgacgagcacgtaagactggccggtcgcattgttgacgagcagatgctcaagccccaaatccttaacgagctgcggcgcgctttttttcctttctaaaaaagaatccggcccccgctcaatgatgtagccgtctttatgcgccgtctgaattttgccgcccgctctcgggcccgcttcgatcagggtgacctcaagcggcagctgtttttccttgatttctttttccatgtagaaggcggcggctagtcccgttatgccgccgccgatgatgaccagatgttttttatcgccactcatttttatcgccttctttaccgtttaattctacttgtccagctctttcagcacgaccgctgcaagcgcgtcgataaattcaggctgtgcgttcggcatggccggacgatagtagcttgcgccgacttcttcggtcacagctttgcattcataatcattatcgtaaagcacctctaaatgatcggcaacgaagcctgcgggcacgtatacaaatgctttataaggatgcttttgatacagctcgcgcgtgagatcctgcacatccggcccgagccacggatcaggggtgttcccttcgctttgccagccgactgcgtaatcggtaattccggcgccttcggcaatcagttttgcggattcctccagctggtcaggatacggatcgccgtattctttaattttttcaggaaggctgtgcgctgagacgatcagcatcgcgtcatcccgttcttctttcggcattgattcatacgttttcttcacctggccgacccaataatcaacgaatttcggttcatcataccagctttcaacagacttgatggtcaagccgccgagcttctccgcttcttctttcgcgcgtttgttgtatgactggacgctgaatgttgaaaaatgaggggcgagcacaaggctgacagcttctgtaaggccgtctttatgcatgtccgccaccgcgtcttcaataaacggttcaatatgttttaatccgatgtacactttgaatgttacgtcgtcctggatttcatttaaacgctgtgcgagcttctccgcctgctcctgcgtgatttttgccagcggagaaatgcctccgatcgcttcatatctgtcttttaagtcttgaagcatgtgcggctccggctttcttccgcgtctgatatgtgtataataacgttctatgtcttcttctttgtaaggcgttccgtaagccatgacgagaagtcccattttctttttgctgctcattttgttaaacacctcttttgatggtctgtctaccttgattttgacaggaaaatcttcttataaccaacgatctgctcaggaagattgttccgtttttttggccgcggaatattcatgtacaaacgccgtcagctttttcagcgttgccggattgacatcagggaatacgccgtgccctaaattgaaaataaacccgtccgttttcatgccttgatcaagtatcgctttcgcttttttctcgatgacttcccaaggcgcaagaagaagcgacggatcaagattgccctgaaccgtttttgtaatgccttgttttctggcgtcatctatgccgagtctccaatcaagaccgacgacatcaagaggaaggtcatgccaatccccggccaggtggcttgcgcctacgccgaacatgatcagcggaacttgctctgctgaaagctcccggaatattctgtccatcaccggttttataaactgccggtaatcttcgcggttcagcgcgccgacccatgaatcaaaaatctgaatggcttttgcgccggcattaatctgcgcttttacataaacgataatcatgtccgcgagcttgtccatcagcatttgccacgcttgcggcatactgtgcataaacgcttttgttttgttgtaatttttagaaggcccgccttcaatcatataactggccagcgtaaaaggcgctcccgaaaaaccgatgagcggaacattcagctgttcgtttacgagtaatcggatcgtttccagcacgtaaggaacatcctgttcgggattcagttcgccgagcttttcaatatccgcagcagagcgcaccggctgatcgatcaccgggccgattccgttttttatttcaacatccactccgatataaggaagaggcgtcataatatctttatataaaatggcagcgtccactccgtactgctcgaccgggagcctcgtcacatacgcgcacagctcgggctgatgcgtaatttcgactaagccgtacttttctttcagcttgcggtattccggctgagacctccccgcctgtctcatgtaccagacagggacgtgatttgttttttctccccgtgccgcttttaaaaacgtatcattaaacgcttctcgtttactcatctgaatttccacctttcctcctgcaaccatacgttcgtgttcttcgcccattacactataccttgttttttctgaatggtatagaattgaggcttaatgttcaaaaaatcgccgaattcatgattaagaagaaaaaagcttcggctgaacgtattccgttccctctccttcttgattcgtctgcgaattaaatggaacgactttgtatgaagcccctgaaaacagattggcgtacggtatgtcaaagctgccttttcctttcaccgaatccagaagcttgtcttttccgtctttcttctcatatattcggtaaacaacccgatcatccttttgaatatcccattttaattgaaccgtaatcagtcccatcgccttaaatgtataacgggccgacagggattttaccgcctccagctcaatcgggctgcccagttccttcacattttcaggctttttgaatgtccggccgttttcccccgcttttgtgacgatatctttaaagagtctgaccgggtattggctgccgcctttcagataatgggttttatccgttttgtcatagcccatccagacggctcctgtcagtccgggagtgtatcccgcaaaccaggcgtcctttgtcgcgccggggatgccggtaaatgtggtcgtgccggttttccccgccaggtcaccttgatagctgccttgtgaagcggttccttcttttacgacctgctgaagcattctcgtcatattccatgccgtctgtccgctgaagacgcgcgttttgccgtttttaggcccggataacgtttctccgtcttcgtccgtgatgttctctataaaaaatggcttcgtatacattccgtttgccgcaaaggtatgataagctccggcaagctgaagcggagtgacgccttcagacagaccgcccagcgcaatcgcgagtccgttgtcagaaatgttcatgccgtttttctcaagatacgattttcccatatccacgccgatctgcttcaatgtccagacagcgggcgcatttatgctgtaagtgatcgcatcctgcatcgtcacttcccccttgtactgtccgtcataatttttcggttcatacccgtcgtaggacgtcagtttgtcttggagaagcgaatacggtttgaacttgtcttcctgcatggcgggcccgtatacggcaatcggcttaaacgttgagcccggctgccgcttcgccgtaaccctgttgtatccttttgtcacgtagtcgcgcccgccgaccgccgcgcgcacgcctccggttttattatcaataaagacggcgcttccctctgccgcctgatccgtccccggaaaatagccgctttccttcatgagggtatatgccgttttctgcagcttggaatcaagtgacgtccggatcgtataaccgccttgaagcagctgttctcctgacatcgaataacggtcttccgcctccttgatgacaagatcgatataactgtcaaaccaaggcgtttctgatgttttcttgacattaagccccaatgtccggccctgggctctgacggcttccttggcgctgatatagccttgatcgttcatcattgcaagaatcgtatcgcgccgttctttatttttatccggatgctgaatcggcgaataaagagatggcgccttcggaatcgctgccagaacggctccttctgcaacggttaaatcttttacttctttattaaagtagtagtgggacgcggcttgaatgccgtaaacgccatggccgaaataaagctggttcaggtacatttcaagcagcttgtccttgctgtaatcacgctcaagattgatggcgataatgacttccttcgtcttgcgcaaaaatgttttatcatgagtcagaaaaatgtttttcgccagctgctgggtgatcgtgcttccgccctccaccttgccgcctgctaaaacatcccggaacaccgcccgtccgacagacttcacatcaatgccgtgatgttcgtaaaaccgtttatcttcaacggcgataaaggcatctctcacatcttccggaacctgctgaatggataccggctcacgattttccgtatagaggctcgcgatttcatcaccgttttgatcgacgatttttgaagatgcgtgcagtattaatttcttttcatcgatgacataatggccgagaaatataatgataatgtatccgattaacgcgagaaaagcggttgccgccgcaattacagccggaataaagaatctttttttctttttcagcataagtcacctcgcctttcttaacttgtagtatgggaaatattgtttcgaattatgtcagaatgagtcgccaatagaaacttataccactcttttgatatactagcaagcaggaggtggctgatatgaaggtttatattacatacgggacagccgattttttaaagacgattgccaagaaacacccgagtgagaatatggtgctgatgcaaggggaggataatgcggttttaattcatgaaacaaatggagaaaccgtttttcaggcgccccattcctatgaaagcatcgacagcgtcggggaaatcaaaaatccgggctacgccgtcctcaacaacatcgccgttacccaggaaggccgtccgctgtttgaaaaccggtttaaaaaccgcgccggcaaagtggaaaatgaacccggttttaaagccatccgcgtattaagaccgctcgaaggcgatacgtatgtcattttgaccctgtgggaagaggaaaaagcctttcaggattggcagcagtcaaactcttatcaggaagctcataaaaaacgcggaacatctgccggtatcgacacgacgtctattttttcccgtccgtcttatgtaaccgcttattacgcaatagactgaaaaccgccggagattctccggcttttttgatgtcccgattttacgcatccttctttgcaccttccgcccgcctatgaataccctgtagcaatcctatttataaacggagtggttcaattggggatcggcgtctactcggtacatctgctttatgttgcttttatcgcggccattatcgtttttatgcttctcagaaaagatacaacctttatttcactcgccggcatttttgtgattgcgctatggacgacgcattcattctccgcttcggtcagcagcctgtttcacagctttacgtatgccgccggagaattgctgccgacgatttttatcatttgttttatcgtggcgatgagcggccttttgaccaaaaccggtattaatgaagcgatgatttctccgtttgcaaagctgatgaaagggccggctgtcgcgtattgggttatcggctgtctgatgtttgccatctctctttttttctggccgtcacccggggtggcgctgatcggcgctgtgctgcttcccgcagcgatccgggcgggcctttctccgatcgctgcggctatggcgatgaacctgttcggccacggattcgctttatcgggggattacgtcattcaggcggccccgaaattaacggccgatgccgcgggcatcccagtgagcgatgtcatgcaggcaagtattccgctcgttttgatcatggggttaacgacgacaatcaccgctttcttcctcatcatgcgggatcgaaaaaaaacgaaggcccccctctccttggacagctccggttctttggacacaagtatgtatctgccgaaaaaactcagggtgatcctggcggttttcattccgcttgtttttctcgccgatattatctgcatgatcgtataccgcctccaaggaaacgatgcgacggcactcgtcggaggaaccgcgatcggcattctcctgatcattcatttcattgtatataaagagcggcatttagaaaagatcaccgagtattttatcggcggttttcaattcggctttaaagtattcggccccgtcattccgatcgcggccttcttttatctcggtgacgcggggtttaaaaatattttgaacaccccgctgccgaaagggtctgcgggaatcgtcaatgacctcggactggccctgtcccattcttttccgatgtccggagaattcgccggcatcgccctggccgcagtcggtgcgattaccgggctcgacgggtcagggttttccggtatatctcttgcaggctcgatggcaaagctgttttctgccgcgcttcatacggacccggccgttttaacggcgctgggccagatttcagcgatctgggtcgggggcggaacattggtcccttgggcactgattcccgctgcggctatttgtaaagttgacccgtttgagcttgccaggaaaaactttatccctgttgcggccggacttatcgtcacgaccatcgccgccatcatcattctcccgtagcaaaaagattgaaatcttctgacattttctatacaatcatgggaaaagcagacgagggggcatcgcttttgacgttaacgacacttcaaaaaagcttaaacgctcagcttgacgggctgtatgaggaaatggttgaaatcaggcgtcaccttcacatgaatcccgagccatcctttaaggagaaaaaaacaccggcgttcatcgcctcattttatgaaaagctcggcgtccccatccggacgaatgtcgggggcaacggtgtcacagcctgtattgaaggcggtgaaccgggaccggtcgtggcactcagagctgattttgacgctttgccgatacaggatgaaaaagatgtgccctatgcttcacaaattcccggcgtcatgcacgcctgcgggcatgacggccatacggcggctctgctcgcggccggaaaagtgctgtaccgcaaccgggaaaaactgaaagggtcatttgtgatgatccaccagcacgctgaggaattatctcccggcggagcaaaagcaatgattgaggacggctgcctcgaacatgtcgatgccattttcggcacacacctatgggcgactgaacccgtcggaacggtcttatgccgcccgggcccagtaatggccgccgctgacggctttacgattaaagtcatcggcaaaggcggtcacggtgcgatccctcacgatacgaaggacgccgttttaatcggctcacaaatcgtcacggctcttcagcatatcgtcagccggcgggtaaatccggtgcagccggccgtcatctcagcaggctcgttcaccgctgaaaatccgtttaatgcgattgccgatcaggcagtcatttcaggcaccgtccgctcgtttgacgaaagtgtgcgcggcctgctcgaagcagaaatagaagccgtcgtaaaaggaatctgttccatgcactccgcttcctatgaatatcgtttcaaacgcggctatcccgccgtcgtcaatcatcctgaggaagcggcgcacgcggcggcagccgcagcggaaacagacggcgttacgaaagtcgttgaaggagagccgcagatggcgggagaggatttttcctattatctgcagcatacaaaaggcgcttttttctttacgggcgccgctttagaaaatgcggaaaccgtttatcctcatcaccacccgaaatttgattttaatgaaaaagcgatgctgacggccgccaaggtgcttatcggcgccgcggtaagctacccccgctgacataaaaaaaacagccggtacattacgtaccggctgttgtaattcttaaatgaaaaacgtgccttgccgtctcaccgagctgtgacagcagtttataattggccgctccgcccacggcggctccgacgaccggcaaaagctgaaacaatttgaccacgtccagataatcgcggtattcctgctgaaaaactctccaatcgacatcatgctttttcgaatcccactgttcaatcattgagtatatgcgtttccgctgttcaccgcttgagaaagccagctgaaaaataaacagcaaaaacaatcgctcatccctgtctttcacatcatagccgtaaatggaggcaagatcgaacagacatttcattttaatggatagcagcaaaggaaaatcagccattcctaaaaaaattccgccggcccccgtaccgataccttcagctgccgcgaccttttggtacgatgcgatggtttgtctggcgagagcatctttttcagcaagcgtcataccgtttgtatcccgcttgcttttcaccagatttgaacccgccattgttgcttcggtcatttttttaatgctttctgtgatgacggcatgaattttttcgggaatccgctcatttattttcgcctgcattcctttagaaaagcgttcaagcatggaatctttgcgcaaaaaacgcgctttccattgcagtgcttcctgtaccagctgctgatcgtcggtcatctgtgtctccttctttcattgaggtttcaaaaacccgattgattacagcttgccgtactttttcaatcttccgcccatatacgatggcatgatcacaaaaatcagaacggctgaagcaacggccgcatacagcaccccgctgactcccgcggcataggctgacgctgcgcagaacagcagcgcctgcacggttaatgacgatttcatcagcgaaaagaaactttgcagcttcgctttctgattgaccgggtaaagctcctgcagagaaagatgatgaaaatgcccgaacagcggaagaagctgtattcccgtaataaagacggtaaatacggttaacgccgccgtgatccacggattggcggaaacgagcataataatcaggataaaaataatcgtgagcctgacctgaatgccgagataatcatttgaacgcagaaaggcccgcgcatacatataggagaacgttttccgctgctcaaacggaatcattctgagcaaaaagtcgagatacgcccggcgttttgcctgttttttcaggtgaggcacatcggtaaacagattggcgattctgtaaaaccgctgcttccttcttaattcatattcaatatgagcttcccattttaatgatttatgttttgcggctgatgtgaaatacacataaaggccggccatcacaatgtagacggcggcagcgtacacataaaacgactgtaagacgaagtataaaagcagcatattgcagataaagcgtatgaccgcatccatcattttcatgcttctgtcattcataaacgtcatccgccactccatggcctgattccacgcttttaccgccagcatctgaataaatacggcggcatacgacgcaagcgacgcccccggacttacagcgaaaaacagaggcatgcatacaagagacagagcaataagcggaaacagctgtgacagatagctgtacttaaatgaatgcttaaagtatgtccccattttcggttcaagcggcagcagaaacacgaggtccgcttcctttaacagcgtccggacgtatgaaccggtcagcacaaatgaaaagagcaccgccatcacccaaaaagagggaaaatgaacggggatgtctttgacccacttgctgtaccagctcgccgcgccggcaataaaaaagatcagcacaatgacgagatgatcattgagcatatatttcatatacattctggtttcctttatatgctcttcaagccgggactgccaaatagtagacatattattcatggccggcgtcttccttcgtcagttcaatatacaagtcatcaagagctgcgtctttcatgccgaactgctctctcagttcttccagtgtgccgcttgcccgcacttcgccgttatgtaaaataatgaatgcgtcacagtagcgctctgccgtagccaggatatgcgttgacatcagcacgcttgatccggcttttttcgcggcgtccatccgctccagcaatgcattgatcgcaagcgggtcaaggccgagaaacggctcgtcaatgatataaagcgagggctccgcgagaaacgcgcacatgatcatgaccttctgcttcatccctttggaaaagtgagcgggaaaccatttcagccttttttccattctgaattctttcaaaagcggaggaagccttttttcaagcgtttctttggaaaggccgtacgccatggccgtcagctccagatgctctttgagcgtcagttcttcatacagcaccggcgtttcggggatgtacgtaaattgcgagcggtagctttccttatcctccgaaaacgtcttgccgttcagctcgatcgagcctttatgcgggtccattaatccgataatatgccggatcgtcgtgcttttgcccgcgccgtttaatccgatgagtccgacaatctggttcggctcaagggtgaatgaaacattttttaagaccgggtttctcgtataaccgccggttaagtcttttaccgatagcagagacataatttctccccttctgattcgtttttcttcatagtaccaaaaataaagtctgatttgaaacgattccctttttttctcacgtgaaaagcgtgcatagttatcgttttggcggacatcataatgtatgtagaaggaaacagctttaatcaactgaaaatgaggtgtttataaaagacgtcttagaacagttggatgaaaatcaacatgtcctgtgcttacaatttcttcacacactgctttgatgatgttcttcattcatgatgaaataatcaaatgaggtgtttgtcccaggaatgattaagcagacccataagtcttcattttaaaaacaaatgaggtgcttacaaaaggcatatttaattttctgtgataaagctcgtacttctgcatcagggtgaacgcgcagccgttcatcctgttttttgttttgaccgtttttgtggtacgatgagaatatacatatatttcttttcagggaggaaacccatctatgcacaaagcggacgattgtattttctgcaaaatcattgccggtgacattccgtcttcaaaagtatacgaaaatgaacatgttgtggcgtttcttgatatcagccaagtcacaaaaggccatacgctcgtgattccgaaaacacatatcgaaaacgtgtacgagtttacgcctgagctttctaaagaatatttcgaagcggtgccgaaagtcgcacgcgccatccgcgatgaattcgagccgatcgggctgaatattctcaataataacggtgaaaaagcgggccaatcggtgttccattttcacatgcatatcattccgcgttacggaaaaggcgacggtttcggggctgtctggaagacccacgccgaagactatacgcctgacgatcttcaggagatcgcttcaaccgtcagaaaacggcttgcctcatcttaaagatgaggtttttttgcgtccggcaacacaaaaaacataaaattatattttttcatatcaaaaaaatcaaaaaattgtgataggataattgtattatttcttacactaaagcggaaaacagggagagatcgtaaacatggaacgtacaacgaatttcaatgcaggacccgcagcccttccactggatgtgctgcaaaaagcacagaaagaatttgtcaacttcaatgacaccggcatgtccgtcatggagctgtcccaccgaagcaaagaatatgatgcggtgcatcaaaaagcaaaaagccttctgaaagaactgatggatattcccgacgattatgatattttatttcttcaaggcggcgcaagccttcaattctccatgctgccgatgaactttttaacgccggagcaaacggctcacttcatcgtaacgggcgcatggtctgaaaaagcactcgccgaggcgaaactgttcggaaacacatccgtcacggcaacaagcgcagattcaaaccacaaccatataccggaagcggacctcacaggaatcaaagacggcgcctacctgcatcttacgtccaataacacgattttcggaacgcagtggaaagagttcccgaattcaccaatcccgctcgtagccgacatgtcaagcgacatcctgagcagaaaaattgatgtcaaaacgtttgatgtcatctatggcggcgcccagaaaaacctcggtccgtccggcgtcacggtcgtcatcatgaaaaaatcatggcttgaaaacgaaaacgccaacgtccctaaaattttgaaatactccactcatacaaaagccgattcactgtataatacgccgcctacatttgcgatttatatgctgagcctcgtccttgaatggctggctgaaaacggaggtgtcgaagcggctgaacggcgcaatcatgaaaaggccgacgtcctgtacggcacaatcgacgcaagcggcggtttttacgcggggcatgccgcaaaagacagccgttctcacatgaacgtcacgttcaccctccgcgacagcagtctcacgaaaaaattcgttgaagaagcgaaagcggctaaaatgaccggactcggaggccaccgctcagtcggaggatgcagggcgtctatctacaacgccgtcagcctggctgattgtgaaaaactggctcagtttatgaaaaagttccagcaggaaaacgaataaatttcttctaacataacggttcctttgatatactgtttgcatatcaatttttccggccatcgcaataaatgacgagcatattattggatggcgaaaaagcttagcagaggagagcttagtatgaaaacaaaagaattagtcattatggccctgtttgcggcaatcggagcggtgcttcattccattatgccgccggtattattcggaatgaaacccgatatgatgcttgtgatgatgtttatgggtattctgttatttccccgtgtgcagaacgtgctgatgatcgggattgtaacgggaatcatttccgcactcacgacatcttttccgggcggacagcttccgaatatcattgaaaaaccggtaacggcgtttctgtttctcgcgctggcgcttttggtgaaaaagagcgtgaaaacagcggccgccgccgtcattacaatagccggcaccttcatctccggtttgctctttctggcgctggcccttctgattgtcggcctgccggggggattcaccgccttggtgctcgcggtcgtccttccggcggctgcgctgaatgcgatcgccattatcattatgcatccgattgtgcagacgatcttaaaacggtccaatatgattgaaacggtgaaataaccgcataccgaaacctcttccggccggaagaggttttttaatgtgtttcagcatgttttatacgagaagttttgtgaaaaagataaggaacaatgcgagggcggttcctgctgagcagacgatggccttttggcggacgacccgcttcggcggataagaagcggcctggccgagcagtttcaggtaataaacggcgcccgccgcaaagacaagagccatacaagataaaacaatcataaagacagacaaccttctccctccttttcccttaaaaaatatgctaaaataaagcaagctatgtatagaagtttattcttctgaacaaaaatgataaaagttatgagaaaaaaaacggggtgattttaaatggctgacggacgttcccttttaacaggccttttcgtaggcggattgatcggaggcgcagcggtgttactttcggctccttcatccggaaaagagctgcggggcaaaatcaaagcgaattgcaattcaattgaggacacaatcaaacggttaaaaaaagacggaatggcgcttaaagaccagcttgtccaaacggcgaaagaaagcgcagaagtcattaaagacgtaggcggagagcttcagaccagcattaaaaggtggcaggaggaaatcaagccgcaccagcaggatcttcaaaaggaaatcgctgatattgaagagaaaatcagacagctggagaaaaccttacaaaactaatatcctatacaaccaaaaaaagtgcgggcatattgcgttccgcacttttttttgcggtttaaagcctttcacagcaacggattaagaatttattataaaattcttaaattttcatctttattaatctttattttattggcataatagaggaaaagaaaatgtgaagcaggtgatctgtattgaatcgtgttgaaccgccttacgatctaaaagaagctttaatctatacccaaaaaatggcgcagctgtccaaagcactctggaaatctatcgagaaagactggcagaattggctgaagccgtacgaccttaatattaatgagcatcatatattatggattgcctatcagcttaaaggagcttctatttcagaaatcgccaaattcggcgttatgcacgtatcaactgcatttaacttttcaaaaaagcttgaagaacggggatatctgaaattttccaagcggctgaatgataaacggaacacgtacattcagttaacagaagaaggggaaaatgtattcgaaagcctgcttgaggagtttgacccgtctagaaacgcggtgtttaaaggctcacagccgatctaccacttattcgggaagtttccggaagttgaagaattaacctgtgtcatccgccacatttacggcgaagattttatggagatattcgagaaatcattgacaaacataaacaatgattttgatagtgaagacggaaggctgaagaaaaaaacagacgaatcggctgtccatgaaacggctgaagagctggaaccgatcaacagttaatcaaagtgcttcattatctcaataaattcttccatcagcgctgtataaagcccctgctcatacagagcaaaaatcgtttcatgaacatctaatttttcgttcagctgtcccgcaaaaagcgcaaggagcttgtcaaacgtcacaaagccttgcgctttttgcgactccagctcgtcctccaattcgcggcagatccgcccgacctcttctccttcttcttcggtcagccctttttcaatcatcatcgcataaaaagggtacttatccatatccaccgttttcaccagcaattgtatgtaatattctaaacgcccgatacgctgatccattgaatccatccgtttcacttctttctatctttaatcttattttagctgataatgaatggagaagaaaggttaaaccgtacatttccatgtttcaccgagctcttctgttcttccctttccggggttattttttttctttaaaaaaggattgattttttctcctgaagagagtaaattattttgagattgtattccatctttgtacggaaggatgactctgatgaattgctggaaaaccattaatctgatcaaagattatggtgcggttcgtttattattgactgctgtaggttttatgatcctgttttttatatgcaacttcttggcattcgggctgctgcgtccgaatatcagtttaagtgacgggcacgtgtttgctttttgtgttctgctcgttgttactttatttgtacataaagtcatacatgtcctgccgatgatctgtaaaaaaagaaaaaaggaaatgaaaatgtacttcttgcggatgccgacatggaaaggcataccgaaaacgacgatgctgatttctacgatcagcccgtttttattcattacgccgctattgttttatgccggactggcatttccgagacacgctcattacttttatatgatttcgagcattcatgcgggttattgcctgcctgatcttctgtttgcgctgcacctggtcaaagcgcccaaatcatgtctgattgaccaggaatccgacggttttgatattttagtaaaaaaagtgccggagtcttgatatcccgctgatttttcaggttacattctatcttttttaataaatatttggtaatgtaatatgggagcagttcagagagagggggaatctcccatcattttattctattttatcgtggctgccctgtttattctttattttataaacaggctcacaaatacattatgccttgtcagagagattcctgaagaccggcaggataaggtattccgttttattaatgtatctattttaattttactgatctcttcattcgtcgagatctcctttactgtgtaaacaggcaaaaaaatatggctgacggaggtctgacccccgacagccatatttttttcttaataaagccaagaagcgccgatgatgatcaataagatgaacagaacaaccaataatgcaaaaccgcctgcaaatacttcacccatctccaaaagcacctcctacaaaacgttttatttttccaattacatcatatgcaatttacttctgaaacgattaggcgcccgggtaagaaaacggatcgcttttagaaaaagcgatccgtttcgcttaacaaatgtaagctgcacctacgatgataagcaatatgaacagtactacgagcagtgcgaaaccgtttgaatatcctccgcccatggttcattacctccttttcatgatcaatatatttgtatgtatcaggaaaaagtttgactagacgaatgccctttatttaaaatctttttacagaaagccacaatatgttatgatacgcatatgcaatttaatttggatgattaggagtgtttaaaggaatgaagaaaatcgcgatagcagctattacggcaacgagcgtcctggctctcagcgcttgcagcagcggcgacaacgacgtgattgccaagacggatgccggaaatgtaacaaaaggcgaactctacacgaatatgaaaaaaaccgcgggcgcaagtgtgctgacacagctcgtacaagaaaaagtattagcaaaaaaatacaaagtatcggataaagaaatcgataacaagctgaaagagtacaaaacgcagctcggcgatcagtacagcgcccttaaacagcagtacggcgaagattacctgaaagatcaggtgaagtacgaactgcttgcacaaaaagcggcgaaagacaacatcaaagtgactgacgctgatacgaaagaatattacgacggcttaaaaggtaaaatccgggcgagccacattcttgtcgctgacaaaaagacagctgacgaagtggagaaaaaactgaaaaaaggcgagaagtttgaaacgcttgcgaaagaatattcaactgacaactcaaaagacaacggcggcgaccttggctggttcgataaaaagtcaatggatgaaacattcagcaaagctgcattcggtctgaaagtcggacaagtcagcgatccggtcaaaacaaaattcggttatcatatcatcaaaaagacagaggaacgcggcaaatatgatgacatgaaaaaagagttgaaagaagaagttcttaaacagaaattaaacgacaactcagctgtacaggcggcaattcaaaaagtcatgaaaaaagctgacgtaaaagtggaagacaaagacttaaaagacacgtttaacacttcaacttcttctgaatctaaataaaaaaaactgtgcgggctctcagcgagccccgcacagtttttttatgcgatggaatgattggagttttcttctgcatccgtgttttcacttgcgggcgccgccatacggcgctcgcgttcctgttccatccgttcaatatacacccttccttctttttcaataaacgactggtcaagcttttcctcttctttagctgttgtgaaaagcttataggcgctgaaaataattccgataatgcaaaggtatacccaccaaggaaaaaatagcacgtcggtttcctccctttttcacccagagtctttattctaagctatgcttgataaagacaagttatgagagctgaacgtaaaaaagaccgatcatagagaatcggcctttttatcttattgatggaacgtcggtttgtagaaagaacggttttccagcgcaaatacacgctctgtgtattcgcccggcttcacccgttccagcgctctgtccatcatgatcatttttgcatccagattgtcaatgtagtgcagaatttccgcttctttcaccatcggcggtttcgggcttccccattccgcttttccgtgatggcttaaaatcaaatgcttcagaatcagcacttcttcagcgtcaatctgaagctcttcggctgcttttgaaagctctgtcaccatgatcgaaatgtgcccgagcagattcccttccacggtgtacgtcgtggagacggggcctgaaagctcttttactttgccgagatcatgcagaatgactccggcatacagtaaatcccggtcaagagacggatacagatcggcaatcgcttttgccaggttcagcatggacactacatgatacgcgagcccggagacgaactcatggtggtttttagccgccgccgggtaatccataaactcagccgcatattttttgaccagatgtcttgtgatccgctggatatttggatttttcatttcaaaaatgtattgagtgacggtttccatcatttcatttttcggaatcggcgccgtttccagaaaatcatcaatgctgacattttcgttctcgccggccggccggatgtttctcagcttaagctggtttcgtccgcgatagtgatggacatctccgatcaccttcacgatcgtctgcgccgcgtacgttacttcatcagtcggcttggcatcccacagcttcgcttcgatatctcccgattggtcctgcagcattaacgtcaggaatggttttccgttgcttgcgattcccttagtcgaagatttaatcagaaagtattgatcgacctgctcgccgacctcgtgcagcataataccttttgccattctattaaaagctccctccatatcttacataataccagtatagcacatacctcttttttgaaaataaactcttttatgacaggagccgcatgacttgtccgctgtgaaaagaccggctgacatgctcatggcaggtgaaataaagtatctgccgcccgccttctgaaagctgattcagcacatcaaacagccgctccagccgctgcctgtcaaaatggacaaaactgtcatcaagtaaaaacggaagtgataccgcagattccctctctgacgcaagggcaaaacggatcgccgcataaagctgctcgcatgccgcctgtgacagttcgcctgctgaaaacacagttccgtctttccgcatgaccataatggaatcatccgcctcggagaaatacaatttatggtaacgtccgtccgtaagcggtccgtataatgcaccggcggtttctaacagacggggaagcgtcacttttttatgccgctccattttttccctgatgatgtgtctgaccgtctgtaatgcggcccactctttagcggtttttttcacgcgctccttctgcatttctgtctgctgttttaaatcggatacaagccccgaggactccagctgctcttgtttcaccgttaataaagcggttttctcacggagctgcgcgcttttttcctcaagcgtttttttctctgtttccttctgaacgactgtatgttcaagttcggacactgtgcggctcatatacggctcaagctgttttccgcctatgccggacaagtgcgttttgatttcgcgcagctgccgctctgtttcccggcggctttcattcagtctggcgagttcacaaaagtgttcgcgattttttgcgcctgccgccatgaaaagctgtttgacctgctgttcgtagtaatggacttcttcgtttaattcacgcatttgctcttgtgcatgcagcagatccgtttcgagcgcctgctttcgttttgcttcctcacgggcccgttccgcctgtaccagcaaaacgcgcagtctttcttttacggacagctcccttccgtctgaaggactcagctttttgacccggtcctcaaatgctctttgcaacttttgcagccggcccgcttcaatggtcagctcatgcttattaaggatttcttttttgacatctttcatcacatgatatgcgtcaagaagatgggaaggacttcctgaaaaacccagttccttcataaaaagttccgcctgtttttcagacggcgccatttccgcctcccattcttcatattggcggatgactctttcatatgccgcttctttctgttcaagcacggcttgatccgcaatcagctgctgccggtgccggccgtcacgccaaagctcttcctgcagaaggtcagccgcttctttggagatcgtcggcttctttttcttgtgaccggcccctcctctttctgacggcagcggtttttgcatgccggacagcatatacagcagcagagcgccggtaaaaagggcggcgggcagccattcctttaacatagcgaaaatcgcaatgaacagaatgcccgcaccgagaaagagctttttttgtttggcgcgctgtttttccagctgctgtacatgtgcctgccattcgtttccttctgtatcagccgtttgcttatatgattgtaaagcggcttctttttctttcctgacagcggggtccaaaatgttttccgacgtcaaggcatgttttcgttcggcttcttccagctccagccgcgcttgttcgaaaatcgcatcaagctgtgtctttctttctcttgcctgtccggcgctctgcacggcttcctgcagccgccattcatattcataatcggtgttcagtgaaagaatgccgtcttcctcatgtcttccgagctgctgcaatcctgacaaaacgcgggcagatgtctgccggatctgtgattggatggcggcaagctgttcaccgcgcgattcgtacatatgctgctcgccggaaagctcctgcagctgccgctctgtttgcagcaagtcctcatttggagcgagcagctcagcctgccgcctgagttcagcagcttttgcccgaagtccctcaagacgggcagctttcggatggagatgcgattcgtatttttcaagctgatgcatcccgtccttcgggaattgcttcaatgcatccggataagaagaaagttcgctttccaaggctgtttttttgtctgcgagcggctttgcttctatcgccgattttactgttttgatttcttcagttatgtctttcaatcgtgcttcggcatcctgcaaacggccgccggcgctttttttctcttccagaaggctgtgatagcccgcttccgcagcttccgcctgtttcagctgggcgctgagccgctttaatgtatccaactcctgatttaagcgggggttccgcccgttcggcttatacatcctttcaagttcttttgccagccgcccgtcaagctttgccgccgcttccgacccgaataagctcgaatacaggagaaactcgccgattttgtcccggttaaaagcttgaatctcctgcagtccgaatacatcgaacgaatagatcgcttcgtacagcgcccggtctgtatcggagagaagctgtttgagccattctccgtccttgatttcgcctgaagccgtatacactctgactttttcggcagcgccttttgtccgttcgattttgacggcaccgtgatcgccatgcttcaattccacagtgccgccgtaaaccccgccgtttttcggttcgtatttttttgatttcggaaaaccgaacagcacgcttttgatgaaggacatcaatgttgttttacccgcttcatttaatccgtagatcacttgcacgggagaatctgacagctgaaaactttggtcggaaaattttccgtattggtaaatatgcattgccgttattttcatcgctgaagctccttcatctggcgtcttaaaacggcttgagcctgccgcttaatatccagtatctcttcatctgtaaatgaagtgatctgacgccgatatacgggatgacgctcaagggcttcaaatacaccgctcatgtccgcgcattgttctatgtcctgaagcagccctttaaaaaacggatcgggcggcacgctgtctgtttcatccgtccgatcctcaagcgcaagcggccagacgaaacattcctcttcggcctcttcctcctgtaaagcggaaagaaactcctctgcgatgcctgcgggcgcctccgtccaaaagcggggcgccgcgccgcgaagcaccagcctgacacatgccgggcggcccgccgcgcgcaagccggagaatgtatccgatgcggctttcagaagtgaagtcatatgttcagctcctgagatatcaagatcaatttcctcccataacacatcatgcgcttctttgaattcccaagacatctcaccgtttgccgcccggacgagataatatcccttaggcccggtttcttttaaatgccgggcttgaatattcccggggtaaatagcggcgggatgctgggcggacagaacctgccgtttatgaatgtgtccgagcgcccagtaatccatgccgcttttttcaaggtcttctttcgtaaacgggcagtacgggtcatgcccttccgctcctgataacatgccgtggagcatgccgatatgataaggcgcgccggtcattttccggtaacgggccgcctgattgaccgttacgcttctttcctgatagctgcatccgtatatgcttgccgcaagctctccgtttttaaagaaagatttttcctccggtgtacccgaggtgaatatatgtacattttccggccattcaatcggcgtccacttaccgcccaaatgatcatggttgccgaatatgacgaacacttggatacccgcttcctgtaatctcgtaaactgttttctcaaaaacagctgggcttttaaacttctgttggcttcgtcaaacagatcccccgaaagcagcacgaaatctgcctgctcccggagtgccccgtccgtcagacggcggacgctgtgaaatgtgctttctttaatacgcgcatataccggttcaggcagattcgaaatgccgtaaaacgggctgtccagatgcaggtcagcggcatgaataaacgtcagatcagccatctcgccctcccctttctgcagattgaattacccttattttagcaccgtttttatacgaatgcacgttctgtaaaataaaaaaacagcccggctgttccgggctgtttcatttattttttggagatgcgcagcgcttgtttgatcgctttgaatccgctggcgtttccgtaaatcaaaacgccgcctttgtaaattttcgcgccgaccgccgcaaagatcacgatagtgaccagtgtcagggcgatcccggccgcagcctgccaaaacgggatatcgagcatcccgacgcgtaaaaacataatcatcggcgtgaaaaacggaatgtaagatgtaacggtaataaaaccggcgtcaggattgccgatgccgaacatggcgatcataaaacctgccacgaccaaaaaaaccatcggctgaatcgtctgctgtacgtcctctatccggctgacaacactgccgagaaacgcggcaagcgtcgcgtaaagaaaatagccgagcaaatagaaaatgacggcatagactatcgtcgagacgggaacatccgtaaaattgaggaatgcactgatcggcgacgacgcatcattttgagggttcagcttcagtgagagataacccgctgcaatcagcaccgcaaactgtgtgatccccacgagcgcgataccgaacagtttggcaaacatctgctgaatcggcggcatgcttgaaattaaaatttccatgacgcgggacgatttttccgtcgccacttccatcgcaatcatgcttgcgtacatgataactgagaagtagatgacaaacagcatgatgtatacaagccccattacctgaccgagctcttcctcagatttcgcccctttttccagcgcgtctttgctgacttccggcggagtgtagaggctgctgactttttctgccgaaatgccgagcttggcggtttcgacagcggttttcgtctgggttaaagcctgcttgagcagtttatacgctgattcatcagaaatggtcagcgccttgtatgctcccgttatcgttcctttttgatcctgtctgatgataaacagtccgtcccattcaccgtctttgacacgctttacggcatctttttcggactccttcgtctccattgcctgcagatcattgtctgtatccgccgctttaagctgttttgcaaacgccgggtacagcccgcccgtttcatcaatcaccgcgatttgctgcttgccgtcatccgattgaaacacggaaataatcgattgcaggttggtcaccgctaatactaataaaacggtaatggcggtcgaaataatgaatgactttgttgcgattttgtttttatatgtatgaaacagcataatccaaaatttattcatatacggcccccaccttttctataaaaatatcatgcagtgacggctcttccaattcgaacttccgtataaaacctttcccttgcagcgcccggaaaatatcctgcgaaaccggttcattcgcgacctgcagtctgattccgtcatttgtttccttccatttcacgacaccttcatgcgtttttaaaaagctgaggtcatcatctgaatgaacggtgacattttttttgccgaaagaccgcttaatgtctttcagattgccttgaacgacgggttttcccttctggagaatgcacaaattctcgcaaagttcttccacatgctccattcggtggcttgaaaaaacgatggaaacgccgctgtttttcaaagaaataaccgcttctttcagcagctcgacattcaccggatcaagaccgctgaaaggttcatcgagaatcagcagttcaggcttatgcaggacggccgaaatgaactggattttctgctggtttccttttgacagctcttcgactttcttattcttgtaatctgtaatgccgaagcgttcgagccatgtcatgagctctttttccgcctcttttttgctcattccttttaatctcgccagatagacaagctggtcactcaccttcactttcggatacagcccccgttcttccgggagatagccgattttttcactgatggaataattgaccggcttccctttccaggtgatatgcccgtcagtcaggcttaaaagacctaaaatcatccgaaaggtcgtcgtttttcccgcgccgtttgcgccgagcagcccgaacatttccctttcaggtatttgcaggttcaaattgtcaacagcggtaaagctgccgaatgttttcgttacattttcaattgtaagcacgaatccaactccttccttgacccattatatactaataatgggtaaaaattaatggaggattttaaattctttatcagaatatcattctataaagggggtgacatgatgggacaatatgtattgaccgcattccatgcgtcgggagaaacgctgctggatgaacggatcgaagcagataatgaggcggaggcgaaggccgccggagaggctttgttagaggaaaaaaagcttgagaacagtactcaccgcttggtaaatgaagccggaaagctgattttattccacagataacagaagctttccggcttctgtattttaccggttaaattgcggcgtccgtttttctaaaaaggcgcggatgccctctttatgatcatccgtttttctcatattttcctgggcctttcgttcaagagataaaacgtcttttaaccggctgatatggaggctctgataaatagccttcgtttcaatcatcgctgacagcggcgcatgcagcaatcggtcgatatacggttgtgccccctccgcagggccgccgctgaacagcccgtcggcaagcttgagccgcaccgctttttcagccggcaatttttcaccgctccaaatcagttttttcgcttcgatctcaccgacgcgtctcattaataaataatggcctcctccgtcgggaaccaatccgatgccgatgaaattcatcgcgagtcgggcgttttcttcggcgagcaccacatcggcgcacagcgcgaaactcagcccgagccccgccgcggctccgtggatggcggctatcacaatttttttcatatcatagagcgtcagcgtaatggattcaatcattttcatgagccgttcatattctcccgaatcatgatccgacgtcatcatctggatatcaccgcccgcggaaaatccccggccttccccccgcaagaggacgataagcgcttcgctgtcggctgccataacgcatgcattttccaattcccggagcatttgttcattcagcgcgttgtaactgtcaggacggttcagcacaatctctgcgatctttcccttttcttcataacgaatatactgcatgtttactccctccttgaatccgcttacatattttgttcaaatgatatattccttcccccgaagcgaaactcctttatttttcaaggtcaacagataccgaaaaatgcatatcatttgaaactgaacatacatttttatatagtgaaattgatatacaaaacaaaaaggggggaaaaacaccgataatgaaatatgtgatactcagcttgttactgagcttttttatggtgctgttccccccttcggatgtcgctcttccttcccaattggtgacagaaacagacagccatgtacaaatttcggtctacccgcaggaaacggaatcggcaaagacgccggttcaaaccaaaaccgctccgcaaggcctgtcaaaaggatacggtgcgttatcccggatgatctccctgttatctgtcaaacctcttgatcaattcattgattccacaatggaaaggacatgcgccattccgatacaataccagtcaaattacctccggcatcagaccatttctcattgccaatctgtatttacggtgtaaaaacagtatattccggagggattttttatgaatattaaagaaaacgatctgcccggcatcgggaaaaaattcgaaatcgaaacgagaaatcatgaaaaaatgacgatcatcattcatgatgacggcaggcgggaaatttacagatttgatgaccgcgaccctgatgagcttctggcaagcatttcacttgatgatgcggaagcaagacagattgccgcgattatcggcgggatggtgtacaaaccgcaggcgcttgaatcgattgaaatggcgttcagcgatctgattatcgaatggtttaaagttgaaaaaggggcaaaagcggcagggcggacgctcggcgaactggatgtgcgccaaaactatgacgtgacggttatcgccatcataaagcatgaccagaaaaagtttttaaacccgggggctgattcgctccttgaagcaaacgatacactcgtcctctcaggtgaaagaaagcatctgaaaaaactgatccaagacttcctctccagagacggagtgtgatctgtttatggaccatctcgtatttgaagtcggtacggcgttagttcttgtggccattgcgagtgtcatcgccaataaaattaaattctcgatcatccccttcctgatcattttaggaatgcttgtcgggccgcacgcgccccaggcgggcatcattgatctgacgtttatcgaaagccgggaagtgattgaatttttcggacggatgggcgtcctgttcctcctcttttacctcgggcttgaattctcagtcggaaaattagtcaaatccggacgttcaatcgccgccggcggaacgatttatattctgattaatttcagtttagggctgatctacggatttatcacgggcttttcctttttggaagtgcttgtattggcgggcgtcatcacgatatcatccagcgccattgtcgcaaaggtgcttgtcgacttaaagcgcacggccaatccggaaacggagctgattctcggcatcattatgtttgaggatatctttctggcggtttacttatccgtcgtttccgggcttgttctgggagacgcgacgtctgtcgggggcgcgctgatgtcaatcgtgatcgctttcggatatatgctgctgtttttcattgccgcccggaaattgccgcctctgctgaacaagctgcttgatatccgttcaaacgaggtatttgtcatcgtcattttcgccgcgctctttttcattgccggcttttccgaaacgattcatgtcgctgaagcgatcggcgcgctcttgctcgggctcgtgttttcggagacggcccattctgacaggattgagcatcttgtcgtgccgttccgtgactttttcggcgccatgtttttcttcagtttcggcctcagcattgatccgttttcactcggagatgcggtatggctcgccctcggcgccgttctgctgacgattgccggaaactttatcgccggcatgatcgccgggcgccgggcggggctttctcataaagcatcgtccaatatcgggctgaccattgtgtcccgcggcgaattctccattatcgtcgcaaatctcggcatcgccggcggcctgtccgcttcacttaaacctttcgccgccttatatgttttgatactggccatcttcggccctttgctcacgaaagaatcgaagcggatatatctcctgctgaacagcgtattcaaatggaagacgcctgaaaagaagccgcagaaatcataaaaaaaaactgacctcttcataagaggtcagtttttttgagcgggaagaaattgctgaaaagccgtttttttattaatggagaaatgctcttttcccagaatggtattgatgattttttggtttctgtaaacagacagcttcaaattcgtagcgcccgttccgtgagcatgatcaagattcgttaatgtgaaaaaatgatgccgtctgtcgtccttaaagacaagacgggaatcggccgtcactttaaaccgtttctcatcctcccattcgatatcgggggcgattgccgtaaaccattccggaatatgaggtttaaagccggtcgccaatatcactttttctgaatcggccgtaaaagtttcatccatctgccattgatgaaagctcagtacacagcgcccgttttgcttttcaattttttcaagctccgccatcggctgaatatacacgtcaggcgaacctccgctgatcgatctgtgatacagggcgtcgtaaatggtggcaagtgtgtcagaatcaatgccgtggcgcagtccgtccagctcagggagtgtgttcagccgttctttaaaaggcaggcggttaaaatattccacataatcaggtgtaaacatttcctgcccgagcttggcggtttccaattctcgaaatccggcggagcgtgtcacccattgcagccggctgcgccggtattgttcatcatgcaataagtcagaaaagatctccgcggcgctctgtccggagccgaccactgtaattgattcggcgccggcgagctcgtctttccggaacaaatattccgtgctgaccatcgtgtcctgacgcgctccgtcatcaatctctgcgggaataagcggttcagaccccgtccccatgacgaaatgcttcgtctgatagacactgatgcttccgtcctcaatgttcttgacgctgacttcataatgtccgccggcatttttcacgccgattacctctgagccgaaacggcatgatttgatttctgaagccgcccagcttaaatagtcgttaaattcccgtctcggaatatcaaattcattaaacgtataaaaccggtacagccggtcatgttcatggagaaagtttaaaaacgtgtagcggcttttcggatcggcgagcgtgaccaggtccgccagaaacgccacctgtaaatccgttcctttaattaatagaccgggatgccacgcaaattctttctttttatcgaaaaaaagagcgtctgttccgggtatatcctctaacaatgcggcaagccctaaattaaacggcccgattcccgctcctatgacatcatacatattatgcacctcttgcgaataacagtctgatgatcttttcccgtttttacagacggttaaacataaaaaaacggcacgctgattccgtgccgtttttgatattataatgcagatttgacgaacatctcatctaagtatttgattttctcttctgtataatgctcgaatcggtcattatatgatttcgggtctttcggattggcgaagtgcgtgatttttccggtttccggatgaatgaatttgcttgccgccccgcagccgataccgataatcgtctgcacttcttccataatcataatgttgtagatgctttcctgacccgggaaggagtagccgacattttcaaggtttccgagaatatttttctgccgatacaagtagtacggcgtatagccgtgctcttttgtccagcggacggcgtcatccatcatgcgggacacttcctgtctgtcggcaactttatacttatgcttgtttctcgtcatttctgacgcccgtttaaaagaaagcgtatgaacggtcaaagattcaggcatcagcttttccgtttcttcaagactgtgcctgaactcagccgtcccttctcccggcaggccgatgatcaggtccatgttgatattattcatgccgtgtttgcgggaaagatggtatttttcgatggtttcttcaacggtatggtgtctgccgatagccttaagcgtttcgttttcataagattgcgggttgatgctgattctgtcaatcttatacttatttaaaacggcaagcttttcctccgtaatcgtgtcgggacggcccgcttcaacggtaatctccctgatattcgcgacatccgggaaagagcggaccatttcttcatataaaagatccatttcttcagcggtaatgcttgtcggcgtgccgccgccgaaataaatggtcgtcactttgatatcatgccgcttcagccattctccgattttctgcatttcatagtgaagcccccataaaaaggagccgactcttcccgcctgtccttgaatggcataagccggaaacgtgcagtaggcgcacttcgtcgggcagaacgggatgccgatataaatgctgacttcatctttgacccggtacagatcgggaaccgcagcgagctggcggtcgacaatctcctgcatcagattgattttttcatcatggatcagatagtcttttttcagatcggcatgcgcctcttcttttgtcaggccgctctgcagctttttatgaagaagtttagtaggcctgatgccggttaagattccccatttttgtgtcatgcccgtatgtgattgaagaagatttaagtagacatatgacagcgtgtttttcacctgtttaaatacttctttttcgctccatccggcaagaagcggtttcgtgtgatgttccttttcgccggttcctttgatttctccggataccgacacgctgtctgcatcttgagaaatggcaagtgagatgacgagatcagagggttcctccgtttcgccgtacgtaagaacacactcttcaaaaaataaattcgcgatgttttgcagcggacgatgcagcctgtcatccgttatgccgtctatttttatttgcaatgtgatcaccttatttttcagattcaaaactttctttagtgtacagaaagaacaggctaaaatcaatccgcgaaaaagccgcagaccggcgtttcgcgtctgcggctcttgattacggccgtttcatatggaacttatcgagaaagcctttgcggtgctgcatgcggaaatattccttaatcatataagccactccctgttcatcatttgaccttgtcacccagtccgcttttctttttaattcatttgaagcattccccatcgcgacgccgagaccggccagctcgatcatcggcagatcatcttcctgatggccgatagccacaacctcttccattgaaagcccgagatcagcggcgaccatcgaaagtccgctttcttttgaaacccctttaggcacgatgttcagtttttctccgttgacgcggatcacatcgacggccgggaatgctttcattatcgtatccgttatatcagcctgcaggccatcttcagcatgcacttcaatgacgggcgctgaaaccggctcatcaaggagcaggtcacttaatgattcgacaaactgcaccggataaaagatcgggtcagacggatgaatcatcgttttcccgaccagattggagttcactttcttcttgttaccgatcgaatatttttcgtgaagaagccggatattgcattgatagctttcgagcacctgaacgatattaaacgtgtgatcttctgatattttcttttcaaaaaacggctcatctattttttcagaaatgtatgcgccgctgtgggtaatcaattttgcattcagctttaatattttcgccactttttgagcggagcgaaaatggcggtttgtgaccagtgtgacgtaaatcccttttttcttgacgtattcgatggcatcctttgtcgtctgatgaagtttgccgttggagcgaagaagcgctccgtctatatttaacgccagcatttgttttgacacagagaagtccccctccttgatgactgtacttgtcattaggatatgaccctgtctctttgtttagaacaaccttttctccgcagcaaaaaagcctgcctcaagcagactttgaactgtcgttttgttgggatacgatcgatttgctgccttctccccaatgtgcatttctattaacgaaatatatcaggaaccccttatttgaccgttgatgcgctcgtttcacttactctctgttgctaccccttaacataccaggcagtataggcgaccgtatccttagatcatctgtaagtgtaggcgctttcagagttattatctcaataatattgttaaaaaacaagggtttttttaactaaaaaaatcaggggaactatctgtgctgaatgtatgataaaattgaaaaggaacgtatattcgcatataataaaagaaaaaaagcggtgactgtcatgtctctattaaaagatatttataacgaagaatttgcagaagcacttctgcacagagtcaaatcggcgtatccggcttttgagcgggacaagtgccgggcgctgatatttcaggaagattggcccggactgacgttaaaacagcggatgcgccggatcacagactctttatatgaaacactgccgaaggattacatacgggcgcttgacgtcttatatgagacagctccccatttcacagggctcgccgggattatttttcccgattatgtccaacagtacggaacggatcactgggaagaatcaatgaaggcgcttcagtttttcactcgtttttccacttccgaatttgcggtccgcccgtatatcaggcttgaccgggagcggatgttcaaagagttcctttcctggacggagcatccggacgaacatgtcagaaggcttgccagcgagggctcaagaccgcgcctgccgtggggaatctccattccggctcttcttgaagatccttctccgattctccctgttctggaccgcttgatgcaggatgactcgttatatgtcagaaaaagcgtggcgaataacctgaatgacatctccaaaacccatccggatcttctggcacagaccgcagccgagcggttcggaagctgtccgcacacggattggattttgaagcacgcctgcaggacactgttaaaaagaggagacaaacaggcgcttgcgattttcgggtttgaagacgcctcccggatttcattggaacgttttacactgaattcggaaacggccgccatcggaacaagcatacatttttcttttcagatccgctcagccgcccggcaaaaagtcagggttgaatacgcgattgattttgtaaagaaaagggggcaccgcagccgcaaggtgtttaagatgtcggagtccgccatggataacggaaacgtaaaagccttcagcaaacgtcattcccttaaagatttaaccacccgcaagcattatcggggaattcacactctgtctgtcatcattaacggaacggtaaaaggttcgcttgatttttctgttgaataaaaaaacccctccatttcatagatggaggggtgtggagcttattgcgggctgccgtaaagctcttcaagaggtttcataatgattttgtttaactcgccgatcagcatgctcatgcgctgttccgcttccatcagctgagaaatcaattcatgctgctgtacgagagcaaccgttttttgtgcctgctctacctcttcctgagtgatttcttcacctgacatctgtttctgctgcagctgcatctgtacattgcggaagttatcaaacatgcgttttgcggattcatctgcgtttacttgatcataaagccctctcagacggctgtattcatcactgtttcgcaaagctttttcaagatcatatgctgcatcataaaaatgaactgccatagtaaccgctcctttcttcctttcggacataccactccactataacagactgcggagcgactttcatcatcggcgtatgttttccttagaaaagaatgacaaacaaagcctgaattgctccgattatcccgccgagcagaccgcctaaatacgttatcatcttaaattctctcttggaaatcgacagcaccatttcttccagccgttcaacgggaaactgatcaacctgctctttgaccacttcctcaagacgcagccgtttcagcacatcctccaaatgagcggcaatactgccgagtgccgcatcaagcagcttcggcgcgtacgtccccgtaatctccccttcataacgggagatgatgtcaccgagccggcattcgaaaaagggcgcggtttgaagtgcggccaaagcccgctttttcatgctgaacagcagatctttcgcattccacttttcatcggcctcataaagtgtataagatttgagcttgccccattcttgagaaagcagatcagccagaagctttttcgtttcctcattgcgcaaaaactttaacagctcaggcagcacacggtctgccaagcttgaattgccgaggaacatctgcaccatgccgccgagcatcccccgggaattcaaaaagtcgtcaatcatatttccgagtctgtctttcccttcttcgctctcaaaataatcaatgctacgcttcaggatataatctgcggccagcgggattttttcatccagcttttcctgcagctcatcaggaagccagtctttgatggcgcggtgctcatatttccggtacaggtccgaaagcttttcatcggtaaaacggtcaatccaggcatccgtcttttcctgcggattccggatgcccgcggcggccaaagcttcgtgcaccgtcatttcggaagcggccattttttgcgtgaattgttcggcgaaaagaagcgcctggtttttaacgttatctgataaaagccgcttttttattccttccggggttaaaaggtggttcgtcaccatgagccccatttgttttgccaattcatcccgtcttttcgggatcagccccggcgtaaacggaacccgttttccgaacaggtaatacggccggtacggacgaaataacatctgaatggcaagatgattcgtcaccgcgccgatcgcggctccgatcacgatcataaatagaaacgttcctgctatgcccattccttttcttctgcctccatcttatgttctattttcttgatgatatatctattcgtattatagaggctggcgggcatgcgggcaaatgaagaacctgaattgttgtttgtgaggaataaggcaagatgctgtttcgtactctttacagtagatcatcttttatgatgcgcttagcatatttattggatggaagggccgttccatcagcggctttttgaataaagggggagtagtaatatgacaacactcggttttatgtctgtatcccgccggcacgaagaagattacgccggggaattggctgaaagagcgcctcaatataatgtgcgcttagcccgctttacaccgtttgatatatttccggattctttgcgcgtgaaagcgctcgtctatcacccgcaaagcggaaagtggaacgaaacggaaatcgatattcccgaatatatttacgaccgctgtttttacggaaaatccgctgaagcgcaaaaagccaaaccgatcgtcgaatggctgaaaaaatatccgaaaacggaatttatcgggcgggggcttcctgataaatggacggttacagatgcgctccaaaagcatcatctgatcagtccctatattcctgaaacggccgaagtcagccgctatgaacaggtgcaattatacttagccaaggaaaaagcatgtatacttaagcccgctttcggcgcgggaggcagaggcatcatcctgcttgaaacaggcaaaaaatcaattaccgccacttactatatcggaaaaaacaaacaaacaaaatcattttccaatcacgtgtcttttaagtcttggtgcaaaaaagtgctgcagcaccgctatttgcttcaatcctacttaaatatccaggataaagaacggcatccgtgcgacatccgcattttcatgcgcaaaacggagtcaggcgtttgggaaacggtcggaaaagcggtcagaaggggttatcagaacggtcttttatctcatttgcccggaggatcagaaccgattaagtttgacatatggtttgaggaaattccgagaaagcagcaggccgttttattggatgatgtcttttcgatcacccaatccgttccttatttccttgatgaacggttcggaccgctgtttgagctggggctcgatatttgttatgccaaagacggacgcatctggcttttggatgtcaattcaaagccgggacggaaagctattttaagcgtggctccggaggcgaaagaggatttgtatacgggtccgctgagacgcttccgcgaacttcagtcacaggacagcaggaagggagtattaccgcgtgaatcataaagggatgattgtcggcatcgataaaaaaagcaaaaatacgctgtttctcccctcctccatgaaacgggaagggcttttatccgctgccttcgggaccaaggttgtcaaatgccgtgtagccttttctcaatcacttgaaaaaagcgcgctcctttctgaagatttgtttgaggagctgttgataccgtataaaagccgggctgactttctcatacacggccagacggtgcacatcggaccgctgatcggcgttttcacagccgggttcacatcatcgccgtcccgcccgttaagagaccgtacagccttcttttccaagatgctctcacttcatgaacaggcgaacggatattgtttcgttttcggagctcatcagatcaactgggaagaaggcaccgtccaagcgctgatttataaagaaaacagctggaaacggacgtccgtcccgcttccgaatgtcgtatatgacaggctcccgagccgaaaaacggaaggagttccgcttttacagcagacaaaacagaggctgatgaatgactatcagattccgtggtttaatccgcaattctttaataaatgggacattcataagcttctggaaaaaaacagtctcaccgcttcacttcttccaaaatctgtcctgcacccgaatgcagaggcgttagagacgttatgcaacacatttgacaccgtctatatcaaacctgcagacggcgcactcggaacggggatttacagggtggaaaaaacagatgccggcttatctgtcaaacacacgaatgaggaaaaaacggtggtgacggcagagtattcagatgcggcatccttcatgaaatcatttaaagaaaacaatgacccgtccgcatttttaattcagcaaggcattgacctgatccggctggatggacgccccgtcgatttcagggtgcacacgaataaaaacgccgaggggaaatggacagtgacggccattgcagcaaaaatttccggtgaaaacagcatcacgacgcatctggcaaccggcggagaagtcaggacgttagctgaattatacggcgatccgcgagagagagtcggcatgatgcggaaactttccaaagccgccttggcggtcagccgcgtgttaaatgagcacattgaaggttttatcggcgaaatcggttttgacctcggcgtcgatcattcagggaaagtttggatgtttgaagccaattcccgccccgggcgcagcattttttcccatccgaagctgagatcggtcgattacctgacaaaacggagaaattttgaatacgcgtcctatttatcagaacggtccatcaccgccccggaaaaactttggcggtgaggctgtctttttttggttttacccgggacaggcacagaatgatgagctacaatgaacaagatcaacatttcctacaaggagcgtgaacgtcatgatttcgcacttcagctggaaaccgttattcaaaaaagagaaactgcccggatggcggatttcattttactggcagggtacgcattacgaaggggtttaccataagtccggtgacattgaatggggacacacacatccgggaaaagaagagccggctctcgtaaaagagctgcacgaattaatgctttatcacatatatgactgaaagctaaaagctcagccgcatcaggctgggcttttcttttcccttccgctatttaccacccggttttccgaatgagatgccctttgattcaccataatacgtagtacaaagcggcaaacagcattgggtgaagccgagctggcaatggttttcattccgaaaatcatcggctggtgcaattccagcaaacccaaccatactacttaataaaggagatcatacaaatggcaaacaacaactcttcaaaccaactattagtacccggcgctgctcaagcaatcgaccaaatgaaatacgaaattgcttctgagttcggcgtaaaccttggcggagaaacaacttctcgtgcaaacggttctgtcggaggagaaatcacgaaacgtttagtatctttcgcacagcagaacatgggcggccaaggcgtacaataactcaataaatggcttacagaaggcgcgggataccgcgtcttcttttatgccgtcacccttttttcctattccacataccctaggaaaaaaggagggaaaacatgtcattcattgcctcagtcaattgggagctgtttcagttcgtaagtgtttctttggtcaatgaatatgttgcccaccatttcccgtttattcacaggcattcttttccccgctgctttgaatgatataatgagcggcgaggaggttttttacatgaacatcgctttactcggagcaacgggaagagtcggacaggcttttataaaagaagcgcagaaacatggacacatggaaatattcgctcttgtcagatcagccggaacagtccttcccattcctgaaaaacagatcataacagggaatgcgaggcggcgggaagatgtcagccgattgatttccaaagcggacacagtcgtgagctgtctcggcacggacggtgacgataccctttcagccgctatgacccatataatagacggcatgaaacggcatcatgttcagcgtctgattacgatcggcaccgcgggtatccttcaatcacggcttatgcctgatcaataccgttttgaatcggcagaatcaaaacgaaaatcaacaagagccgcaaaggaacacgcccgcgtatacgagatgctgctggcagaggatcttgactggacgatcatctgccctacctaccttcctgacggagacgctgccggagtttaccggttcgaacaggatcgccttcctgaagacggcgccgaaatcacagtcggagacacggcacattttctgtaccgcgagctgatcagcccgcagtttgtcagaaaacgggtaggactggcttactgaatgaaaaaagggcgaatcttttgattcaccctttccgattacaccgcggatttcgccgttcctttctgtaattcatacatttgatggtactgccccttttgcgccattaattcgtcatggcttcccttttcaatgatgcggcccttttccagcacgagaatctggtctgcgtgtctgatcgtggaaagccgatgggcgataataaatgtcgtgcgcccttcttgaaccacttgcagcgctttttgaatgaccgcttctgtttcggtgtcaatgtgcgccgtcgcctcatccaaaattaaaatggccggatcgaacacaagcgctcttgcaaaagaaatcagctgacgctggcctgaggacagtgtgccgcctttttcggtgacgggctctctgatgcccttcggcaaagattgcagaaggcttgcggcgccgacttggcgaagcgcttcttccgcctgctccagagaaatacgctgatcatcgagtgtcacattggagccgatcgtgcccgagaaaagatacgggtcttgcagcacaatgcccatatgcgacctcagctcctgccttgacatgctgtatatgcttttaccgtccagcaggatatcccctttttgggcatcataaaaacggaacagaagattcaggatggagcttttgccggaccccgtatggccgacgagggcgaccgtctcccctttttcagctgtaaagctgatgtgtttcagcacctcttctccctttcgatatccaaaagaaacatcgcggaattccactgtcccttccgcctttctgtctgcgggagcgccttcttcttccgtttcctcctcctgtaaaagctcgaatactctggcggcagagacacgggccaattcaagcttcgaaaattggttgacaatccccgtaaccggctggaacaaacggtttaaataatcaacaaatgcatataaaacaccgatcgaaacaattccggccgcactcagactcgcgcctccgaaataccagatcagcccgacaaacgccagattgcgcaacacattgacaagactgtgggacatgagggaatttaaggacagcattttgtttttgtagcggaaatgagcttcattcaattcttcaaattccttcatcgtttccttctcgcggcggaacgcctgaataatcggcattccttgaatggactcgttcattttcgcattgatgtcactgttaatggaacggattttttgattgaagacggatgcatatttgcggtacacaaccgaccagatcattaaaatcggaataatcagaaggcaaacggcggccagcctgacgtcaagcataaacagcgccgtaaaaatgccgagcatataaacgccgcttgtgataaatgtcgacagcaccgttacatataaatccctcaccgcttctgtgtcattcgtaatacgggccacgacttttccggcaggcagattatcaaagtagcggatcggcattttctgaatgtgtgaaaatacatcctgcctcatgcgctgtatgatccggttcgctcccatctgcagcagataatgctgaccgtaatgaaaacatacggaaaacatgagcaatcccgcataaatggcggtcaacgtcagcaatccttttatttccggacggtaaaattcaaaaatctcctgtcttgataacgtaatgacgggatatgacctgctttctttaccgtttgatattgtcagccggccgtcagacaccgaacggtttccgtcaaaactgacgggacggtcaacaaaatagtagcccgcaccgacttgataaatgtgcgcctctccggttttatccgcccccggtttgagccggtcctccctgacataatcatgcccccggaacctgacggcgcccggatcgtccgcagaggctttaacccatgttttttcaatgccgagaatgtggtcatcaatcattttttttccgataaacgggccggtcagctcagtgccgaccgcaataatgagcaggacgaccgcccatatcagcagcttcttatattgaagcgcgtaattccataatcttctcccggtcttcatgcgcccgtccccccttcttcaagagaggacagctgctgcctctcatattgttttcgataccagccgttctgcgccaatagctcccggtgcgtgcctctttcagacacccggccttcgtccatgacgagaatgagatctgcgtgttcaactgccgagagccggtgggtggtgataatcgttgttttatgccgccgttttttacggatgctgtcaatgatggcggcttccgttttcgcgtctacggcagaaagcgaatcatctaatatgagaatatcaggatcggtcaaaagcgctctcgcaattgagatgcgctgcttttgtccgcccgagagcgctacgcccttctcgccgacaagcgtctcaagcccgtcggaaagcatgccgatatcgttttcaaaatgcgcatctttcagcgcgccgccgatttcctcttcgtttgcatcctgccgtccgtaaagcagattctcctttacagtcttagaaaataaaatatgatcctgcggcacatagccgatccacccgcggagctcctcaagcgggatctcctgaatcgggacgcctgtaaacgtgacctctcccgcaccgggcggatattcacgcagcagctgcttaatgatcgtcgtctttccgcttcccgtcttcccgacgatgccgagtgtctgccctttttctacggaaaaagatacatcggaaaccgccggtcccgctccgctcggatacgtgaaagtcacttgttcaaaaacaagacgcccgggctccttgatgccggcggggcgcttgggcccgatcacgtcaggctcataggaaagcgtctcattgacacgatccaaggaggcattgccgcgctgcatgatattgattaattctccgatcgcaaacatcggccagatcatcattccgaggtacacgttaaacgataccagctctcccagcgtcagccggttttgaaaaacgagataagcgccgtagccgagacctatgagatagctgaggccgacgagaagtttcacagtcggttcaaaaagtgaatcgataaacgccaccttcatatttttctcatatacatccgccgtcatatcaccgaaccggctgacatcatttttttcctgcacaaatgcccggatgacccggacgccggataccgactccagcaccttgtcatttaatgatccgaaagcatcctgcgcttccgtaaaccgctcatggatcttttttccgtacaggctgaccgcagccgccattatcggcagcggaataatcgcggcaaatgtcagcttccagctgatgagaagccccattgtcaaaaatatcgtcagcatatacatcgtcgaatcaacgagcgttaagaccccgaagcccgtcgtcatactgacggcctgcaggtcatttgtcccccgcgccattaaatcgcccgttctgtatttctcgtaaaacggcggtgacatttgaagaagccttcccatcagctttgaccggagaattttctccatgacattcgccccgccgaaaagctgatacatccaaaaataagacagtaaatagacggctgccgttaatgcgagaaaaacacatatgtaaaacagcatcccgcttttcgtaaacacgcccgccttcatatcgtctatcgcattaccgagaagtttaggcggaaacatctcaatgacattcacaatcaataacagaacaatcgctgtcgtatagcgcagccaataggctttaaaaaaccacgcgagcttttttaatacagtaaacaaataccgtcatcccctttcatcaatcagccgccctcaagcttttccggattgtttttcattgttttcgctaatgccgccacatgcatcacacctgtctttctttcatttttttgtataaaaaaagacatgaagcctcagctccatgcctcttattattataaataaggtacagacccgccgtttatgcgcgactgccccgtttttaagcaaatgttcagaaaacggaagctgtatggaagtcacgccggtattcagctgaagatgagttgacaagctttagttttgacatgatccatacctcctttttcctatattgttccttcatcatataaataaatcctttttttgtcaatgcgggttttacatttctgccgcacgggtattgtaaaacaaaccttttttactgaaaggatgaggctgatgtttcacgcagaccggttgatagcagcttttgacggaagtgatgatagtaaaaaagcgcttcaaaaagccatagacctttcaaaaacgttccacgcggatttaacggtcgtacattcccacagtgcaaaagatacccagacgattgttgatcccccgaggccgggagccggggcaacgtatatcggcggcgggattgcaagcgttcctgacccgcttcaggcggaaagaatctcccctgatccgatgatttatgaagaccgtacggaagaaatcgttgcggaagcgagaatgctgatgaacgacagccagattgacggggatatcgacattttagaaggtgatcccgctgatgccattatcgagcatgccgaccgtatatcggcggatttgatcgtcatggggagccgggaccagaacaggctgaaaaaacttttattcggaagcgtcagtgaaaaactgtcatcgaaatccgatattcccgtgctgatcgtaaaataattctttctgtaaagcagcttaatcaaaagctgctttttttacagctcccggctgttttttctttttttcggcattacaaaaaaactcgccatgatcaaaaaatcgatgcacaatacgacagaccagccctttaacagtccgctgagcgcttcggtgcgggaagcgtcctgaatgagaaataccgttccggctaaaagaacgccgccgatgacaaatgctaatacatgtcttccccatccttttgcataatgtttggcataatccagtccgtaccgcttgaccggttttgccccttcctttaccacataatagcggaaccgctcatccgcccactgaatcatgctttttccgaaggcgacagacactccgatataaacggccgccactgcatgcgccatagtcgccgccgcccctctgtataaatcagctgcggccgccagaaacagtacggcatccaatataggaatgagagcgaaaaaaaacattccgagcttttgccgcctgaatatatagcgcgccgccaatccgaagatgacagccgcccaaaaagcagcctcacaaatgacaatcaaccaagcaatcgcgttcaatccggttcccccttatcgttttctaaaatgcattgtatcactgctttttatttaatacaactgtattacaaaattgcaagaaaaaatatttcctgttacactggaaccatgcctaaaataatcgatcatgaaaaaagaagaaaacaaatagccgaagccacttggcggacgattttggagcggggaatggaaggagcgacagtgagaaacatcgcccaagaagcgggtctttctttaggcgcgctgaggcactatttcaccacccaggatgagcttttagggtatgcgatgacactcgtaaaagaaaaagcggccgccagaattaacgaagttgccatgaaagatctgccgccgaaagaaaaagcggtgcgtctgatgcttgaaattatcccgacagatgaagaaacgatggctgaaatggaggtgtggttcgctttcacagcttatgccagacataagggagaagagtttcaaccccagcaggacgggatcttggcatatatccgcggcctgattgactggctggatgaaaataagcttctgaaaccgaatcttgataaagaaaccgaagcggagaaaatgtacgctatcgccgacggattggcgctgcatgccatgcttgaacctgatcgtctttcaaaagagaagatctcccgtgtactcgttcagcatatcgaatctctttttatctgactggagcaaaaaggccggatgtgttccggcctttttttcagcttatgactgaacgccgagctcctgctgaatgtgcgactgaaaagcctcctgaatcgttttggctacaggtcccggcgatccgcttccgaccggttttccgtcaagggttacgatcgggattaattcagacgtggttgacgagatgaaaatttcatccgcatctctgagttcctcttcggtaagagccttctcccgcacctcaatcccgttttctttcatcagctctaacagtttcatccgcgtaatgccgtttaaaatcagctcatttgcaggatgcgtccggacggtgccgtttatgacggcgtatacattggatgaggttccttccgtgaccgccccgtcccttatcagcacggcttcataagcgcctgcttcataggctttttgttttatcatcacattatacagtaaattcagactcttaatgtcacacctcagccagcgtttgtcttccgccgtgatggcctgcgctccggctttttgttcattttccggttttttcactgaaaaggtgtatgccgtcgtctgcggctccaatccttcgtcatactggtgcttccgcggcgccttccctctcgtcgtctgtatatagaccccgccgtcaatgagtttgttttcctgtacgagcttttgcagatcccattctatgtcctctgcggagaacggcagggtgatgccgatttctgcggcgcttctgaaaagacgggcgatatgctcacgcagaccgaataaggcgccgttatacactctgatgacctcatacacaccgtcaccgaattgatatccgcggtcctcaatatcaactgccgcttcttcacgatcaatcaactggccgtttactaatgtcttcatgtaaaccctcctaatcgttatctgccgtgatgtgcattctcagctgttattgtcaactattctatcatactgaacgagccggctgcggagtttatttttttcttaaaatcttattattcgacatcttttctatgtcttttccagttttgttcctgtatacttgattcgacatacatatgctgttaacttatggcacttcgcaagcctccgctgttatcggcattatgcagaaacttatgctactggagagattgttatgcgcaacacaaaagaaggtgcttccccttctctgttttcattggcttttaaacttacgagtttagcagttttgtgcggactgcttctggtaatcgtcataatgggatattccgcttccgccgcaaaaaacaaacaggtcaccgtgaccgcaaacgggcagcttcgggatgaagcagaaagcctgcggctgaaaaatgattctcccgacgtcttaatgaaacatttgcagaaagagcgtgacccagggaaaaaaacggtatatttaaccttcgacgacgggccgtctccatatactgaacagctgttgaatgtattgaaggcaaatggcgcaaaggccactttttttatgcttgaaccgcggatgaaagcctataagcattccgtgcaaagagcgaagcaggaagggatcgcgctgggcctgcacggcgtgacgcacgataatcacctgttttatcaaacaccgacatcaccgctgaacgaaatgcagcagggacgcgatacgctcgagacaatcactggagtaaaaacggatcttgtccgcacgccttacggcagtaaaccctcattgacggatgcccagattaagaatctcgaaaaagacggattcgtgtactgggactggacgatagacagtgaagactggaagtacaaaaacgcgcggtacgtgccggaagtattgaatcagctcgcatatttggaaagcgttcatacgagcaggccgcatgtcattttaatgcacgatctgcctgcgacggtgcacgctttaccgagcctgatccaaaaactgaaagcccagggctactcctttgatgttctgacggatcaaatgattcccgtccatgaataagaaaagccggatctgtataggatccggctttttttatgtcgcggcgctgatccgttttgcaaattcaccgatcttctcatggatgacaagatcaaataaatggtcgcaatatgtcggctcaaggttaatgatcacttgcttcaaaccgggaatccggcccgcatcctcagggacaaaccttgccggcgccacttcaagcgaagtgccgatcacaagaagaagatcagctttatcaagcttttcataaagggtttcaaaatgctgaacgagatcgccgaacagcacgacatccgtctttaatacggtgccgcataccgcatgatcaccgacttcggccgtacattccggcacttcgtccttcagcagatgagaaagcccgtagcgcgctccgcagcgggggcatgcggcggtctgaattgaaccgtgaagctcatagacactgctgcttcccgctttcttatgcagtccgtcaatgttctgcgtgaaaatgtctacctgctttccccgcttttcaagatccgccaaatacgtatggccggcattcggctcatagcttccgctcattttcatctgaaagagctgtttgaatttaggccagaattcacgcggacggcgttcaaagtattccctgctcatcgcttccattctggaggtgtcttcggtccatataccgcccgccgaacgaaaatcgggaatgccggattccgtgctcattcccgctcccgtcagcaccaggatacgttcagcctgattgatcaatgttataaacgcttccactcttccaccgccttttctttttatcatatcatgaaaaaagaacggcgcctgttatgcccgttctttttctccggaatgatccttcacatgaaccggatcatcgtggctcttctgttttacgaatacattctggcccggataggcgaactccacgccttcctcagcaaaaatatcaataatccggcggttgatatcctgccgcacgtccaggctttccgcccagacgatggtctttgtgtaaaagttgaaaaacagattgtaatagctgtccgcaaacacgtcaaagttaaccataatcgtatcatcatgcacgccttcatgttcacgaagcatttccctgagccttgtgatgcaccgctctaaacgatcaatcggcgtcgcataagaaacacgaacggaaaacgtgacctggcgcttcgtcatcctcgtccagtttgtgatggcttccatggacagcgttgaattgggtacggtaacaagcgccccctgcgccgtgcggaaccttgtgcttcggaatgtgatatcttcaacgccccccgtcacagatgacgtctcgacccagtcgccgatcgtaaacggcttttccgtaatgatgataatgccgccgaaaaaattgctgatcgtatctttagccgcaagcgcgaaggccaagccgccaagtccgagtccggccacgaacccgtttacatcataattgaattcctgcgcgatcacactgacgctgagcgcgagaatgacaaagcgcagcaccttggataaaaacggcgccaaaatgtcatccatatcaagctcaaagcgctgattgactttatgaaataaaaacgaagacgccgatgtcagattgcaaagcccccaggcgatcagcgctatgatcaaagagcggtacatttttttgacaatgtccatctgcccgtctaaaaacggcgaatactcaatcgccaaaaacagacccagcgccacgaaaaaccatctggccggcttgtcaaacgctacggcaatctgtttgaatatgtcggttttcggcttgttcgccaatttgtaaatgagctgaaaaaagtatttgacaaacagttttctcaaaacgagaaaagccgctaaaattccgatgctgatactgatctgcaaaatatggtcaagagtaaaaaagctctgaaattgtgtcatcatggcatatgctcctttgtcttgtcgaaaatctattatactaaaacattcggacatcagcttgttttaatgtctttaggcagcctgaaaaaccccggcctcagagcacagccggggtttttcacacattcgttcatctttcagccagatacaacagggtcaggcactatttcttctttgattgtgtctgtttcaggagagtcgctttttggatttcagcatcggtttcggccttaattctttcttccactttcaatctcccttttcccatgatctcgcctcctttttgccattataaatcatcactgcggattgtaaaccgaaaaaagcactatctttattccaaaaaaatactgttttgcacattcaccagtttgaatcgctgtgcatatacgaatctgatataataacagaaatgcccatgaggggagctgacaagcttgtataccatcgctcatcgcggcgcatccggttacgcgcccgaaaatacatttgcggcatttgatatcgctgccgaaatgaacgctgatttcattgagcttgacgtccagctcacaaaagacggccagattgtcgtcatccatgatgacaaagtcgaccggacgacggacggctccggttttgtaaaagattttacgctgaagaagctgcagtctctggacgccggcagctggtatggggctgagtttaaaggggagcggattcccctgctcgaagaggttctgaagcgttatcattctgaaatcggatttttaattgaactgaaagggcacgtttctcaagtcggtcttgaaaaagcagtcggccagctgttaagcaggtttaccttttccattcaccctatcgttcaatcattcagtctcaagtcgattcagacctttcacgacatgtatccgtccgttccgactgcaattatcgcaagacccagcttcgggatgttttccaaaagccagctggccgcttacaaatcagccgcaaattatgtcaatattaaatatacccgcctgaatcggttcttgatttccaccgctcacaaacacggcctgaaagtatttgcctggacggtcagaaatcacaagacggccgaaaagctgcaaatgatggcagttgacggcattgtaactgattttccggatattatttctaaggatggctgatatgaaacaatacatcgcaatttttatcggaggcgcgcttggcgcattgctccgctttgaaatgagcgcgcacattcacagcggaactttcccgggtgccactttcctcgaaaacgcggcgggaagccttttactcggtcttattacgggttatttcatcattcgggctaaacgccctcttttgaccgcctttttaggaaccggtttttgcggaggtttcacgacgatgtcaaccttcgcaaaagaaaccatttttctgctgcaatcgtctcccgcagcggctttttgttatgctgccgcgactttattcgctggtcttgctcttgcatacgccggcatttttttgggacggcggattgcccttcacgcagccggaagggggcatgatacgccatgacgattgtcctgatgcttatcgcggcgggtatcggagcggtattacggtctctgctgggtaagacaatttcagaaagaacaaaaggttttccgattccgcttggaatggctgcggtcaacctgctcggctccttcagcctcggcatattcaccggcttgggtctggataatccttctgccggcgtcatcatcgcgacgggctttttcggtgcgtttacgaccttttccaccttcagtattgaagccgtgcagctgatgatgaacaaccgcataaaggaaagcctgctctacatcgctgtttcagcagccggaagccttttggcgttctggtgcggctttgttatgatatccatttaaaaaaaccttgagcttatttttcgctcaaggttgcgttatgaagcatgaccgtttccggcacgggcagcgggcggtttattgtcccctgaccgcccgggcggccctgttcttctttgagttcaagctgtttaataaaccggccgtccatttctaatatgagggcagtgtatcccccgatttgtatcgactcacccgcacaaatgtcaatattccgtttcagcacaagaccgccgatcgtgtcgacttcctcttcaatctctgcgccgagaagatgattcacctgatcgatccgaacctttccgtccagcacataatggcgttcggacagcttttgaatctgcggctgttcgtcctcatcaaattcgtctctgatatcgccgacgatttcttcaagtatgtcttcggtcgtcacaagaccggacgttccgccgtattcatcagacaatatcgccaaatgaatccgttctctctgcatttttatcagcaggtcgtgtatcgggatcgtctcgatgacttcaatcaccgggcggacgtaagacatgatggatacttccgctttttcatcttctgtcataaacagcagatctgaaaagagatgcttcgtattgatcatgccgatgacactgtctttgtccccgtccgttacgggccagcgcgtatatttgtctttcagcatcatatcaagcatttccggcacgtccatatcagtggaaacagccgcgatttcttttctcgggatcatgatttccttggcgatccgattatcaaaatcaaaaattttattcacaaatgtatattcagacggattgatttctccgttttttaaactttctgacagcaggatccgcagctcttcttcagagtgggagccttcatgctcagatgccggctttaatccggccaaaccggtcagaattctcgcggagccgttcagcacccaaataaacgggaacatgaacacgtaaaataaccgaagcggtccggcaatccataacgtcagcttttccgctttttgaatcgcaaccgttttaggcgcaagctcaccgacgacgacatgtaaaaacgtaatcagcccgtacgccgcagcaaaagcaatcacatgctcggcagaatccggcagccccataccctgaaacacaggatgaagcatccgctcaaatgcaggctctcccagtacgccgagcccgatggatgtgagtgtaatgccaagctgcgaggcggataaatactcatcaagatccgtaatgatacgctttgcgagcaccgcccgtctgtttccttctgagatgagctgatcgattctggatctcctcactctgacgatcgcaaattcactcgccacgaaaaatgccgttaacgcaatgagcacaccgattaaaatcaaactgtcaatatcgtccatttcaccttatcccgaattgaaggataaggacgtcacctcctgatttcatcgttttttcttaagcgagaggaacgaaatgggtgattgactacacagagggccccatcctgccacctcctaagtcaaagcatgattgtcatttgtatagtttattgtatcacaactccattctttcatcattttcagatttttcatcatataaaaacagccttcaaaaagaaggctgccgttatctgcttcggaaatgattttctaaacaaagcgccgtattaatccccccgaatcccatgcttaagcttaacgcatggtgtacggtatgggcgctcggcccgtcggtcacccactgaaatgaatcgtcaatcggctccgttaagtttcggatcggatgaagcttgttttcccgcatttgcaagagaacagcaatgatttccaccgttccggccgcactcagaccgtgtccggtaatcgattttgtcgcattaatccgcgcgtgcgacaggccgctttcagaaagcgcccggcattcagtcttatctccgatcggcgaaccggtgccgtgcgggttgatgtaatcgatctctttcgctgaaagaccggcccgctccagcgcctggcggatcaccgtcatttcgccctctgctgaaggattcgggttgcggttcgcatcggaagccatcccccagccctttaagccggcccacgatcgtgcgcccctctcttcggcagattcagcgcgctccagcacaatcgccccgcacgcctctccgaatataaacccgtccgtatgccggtcaaacgggcggcaggcggcttcaggccgttcagcgtatgtatcagtgcccatcgctcccaaagaacggagagcgtgacactccatgtacgacagatcggccagcgccccgatcacgatgcaccggtcaaacaggcctcctttaattccttgagcagcctggataaccgccgcctggccgcttgccgacgcgccgccgaccgtaaaggccggcccttttatcccgaattgctccgtgcaaagccccgacaaatcactatccataaaagaaagcccgtatgtcggatttacaaattgcggcgtttcaccgtttttctcaaaggcctgcagcaattcgcgctgcgtcatattcgacccgccgatgatcagaccggtgcggctgtgatcagcgccgtctaattgagcgtcatgccacgcttcatataaagcgataagcgccgtctttcctgataatgcggcccttcggtacaagcgcttcgacagcgcgtccggcggcgttaattcgctaagctccgcgccgataaacgaactgcctttctgccggccgggacgtttcatcacatcaaaggcgtgccgcccctccatgagcgcatcgagaaacgcctccttgccttgtccgaccgcggttaagactccgattcctgtaatgctgatgtctgatgtgccattatttctcctcgacatttgtccgttctcccatctttatgtgttggaagctatgaagaaaaatcttgatacagtgctttgaaaatatcgcgcgactgtctgatctgttccgaaggcacgctgaaagataatcggaaatagccgctttttccaaatccgctgccgggtacgatcaatagtctgtatttctgtgcggcatgcatacagaacgccacctcgtcttcaatcggtgatttcggaaagacgaaaaagcctcctttcggcatttcaaattcgaagccggcttctgtgaggatgtccaccataaggtctctccgctttctgtaaggttcagcgtcaatcgaaagatcatccattttcgccacggcgcgctgcatcatgaccggagcgttcacaaagccgagcgtccggttgcagaaaacgaacgcatccgtcagaagatcgccctcaggcatttgggcgtccgccgcgatatacccgagcctttcccccgcaatgccgagatctttactgaacgaactgactaaaatcacgcggtgatacgcctgaaacggattcgcctgctcttctccgtagatcagctggctgtacggttcatcaaataaaataaatatgctttggccgttccgctcttcggcttcttttaataaggcgcctaattcgttaaggtttttctggctgagcacagtccccgtcggattatgcggcgtattaacgatcagtcctttcgtacggggtgtgatcgcacctttaaccgcttcaatatcaatctcaaatgagtcagtcagcgggcagatgacgggtctgccgcggtaattttcaacatacgctttatattccgcaaaataaggcgaaagaaggatgacttcttcctccgggtttaaaatgctcttcagcgcgacattcagcgccccgccggctccgaccgtcataactgtatgcctggcggaaatctcggtctgaaaccgctctgacaaaaagcgggcaaccttttctctcgcctccggaagcccttggttttgtatgtatccgtgccgccctgtttcagccgcttcgcaaagcgcctttttaaacgtttcaggcggctccgcaaccggatttcctattgaaaagtcaaacaccttatcggcgccgaactcttttttcagccgagcgccttcatcaaatagtttgcgtatccatgaacctttctccaggttctgtgtcacttcccttgataaaccggccactgtcatctgtcccttctgtctttttctgccgtttctatttacaatgattatgaaagatttacatggcgcagtcaacgctttttcagacagcctgccgccccgtttcaggagaaagacggaaaacaataaacttgtgcaaactccccttcatatattaaactattctcataactataacgtgatggttggggagggatttagatggggctgagacttatcgcatcagtgaattagcagagcttgccggtgtaacgaaacgcacggtggattactacacaaacctcgggcttttaaagcctgacaggtcttgttcgaactatcgttactacgatacacttgcacttaatcggttaaagtttatagtcgcttgtaaaaagcagcgattggccctgtctgatataaaagatcgactggagaaccagtttccctcttcagccctgcctgacgatgttggaaatctggcatcggaaattgatcacatgaatcaaaacatctccgggatcttgaatcggtttgaaaagcttgaaccagaggagcgcgcccagctgaaaaaaaggctggctcctgaaaagcttgcagtgcttcaatcatttatgctgctgttaagttaaaccattatcttactaacaggaggtgttaccttcatcttcccaaaaggagtgaaggttctaattggacattgtgaatttgattttagtcgcggttttaatcgcgctgacggcatttttcgtagcatctgagtttgcgataatcagaatcagaggctcacgggttgaccagcttatagcagaaggaaataaagccgcaatcggtgtcaaaaaagtgaccacgcatttagatgagtatttatcggcgtgccagctcggcataacattgacttccatcggtcttggtgtcttaggcgaatcaacgattgaacgcttgcttcacccgcttttcacaaagataaacgtaccaagctcattatcgcatattatttcatttattctcgcctacgcgatcattacattcttacacgtggtcgtgggagaattggcgccgaaaacagtcgccatccagaaagcggaagccgtttcaatgctgttttcgaaaccgctcatttggttttaccgcatcatgttcccgtttatctggcttctgaacaactccgcccgtcttttaacgaagacgttcggtctggagacggtgtctgaaaatgagcttgcccactctgaagaagagctgcgcatcattttatcggaaagctataaaagcggtgaaatcaaccagtctgaatttaaatatgtgaacaaaatctttgaatttgacgacagacttgcaaaagaaatcatgattccgcgtacggaaatcgtcagtctgccgcatgatatcaaaatttctgaaatgatggatatcattcagattgaaaaatatacccggtaccctgtcgaagagggtgacaaagataatattatcggcgttattaacattaaagaagtgctgaccgcctgcatcagcggcgaagtatcagtcgactcgccgattacggattttgtcaatccgatcatccatgtgattgagtcggcaccgattcacgatctgcttgtaaaaatgcagaaggaacgggttcatatggcgattctgtcggatgaatacggcggaaccgcggggcttgtcaccgttgaagacattattgaagaaatcgtcggggaaatccgtgatgaatttgatatcgatgaaatcaatgaaatccgcaaactcggcgacggccattacatgcttgacggcaaggtcctgattgatcaagtgaacgaactcctcggcatccatttggaaaatgacgaggtcgacaccatcggcggctggttccttacccagaaatacgacgtcgaacaatacgactcgattatcgaagaaggctgcgaatttatcattaatgaaattgacggccaccacgtcgcatatatcgaagtgaaaaaactggcgtttgatgaactgctggaaactgccgaacaaaaagaagcataacaaaaaagcttgcgcgtctgatacagacggcaagctttttttcatttacagttgttcaagttttttctcaagctctttaattctggcattcagctcttctgtcatggccgcaagcctctccttcggcgcaagatcggaaaagtcctccaaaaaaatcggctcgccgatgataagccgcatttttccctttttaaacagcgcttttcccgtagacggccctttatatgcggccggaacgagcggcgctttccccatttgggcgatggtcacggcccctcttttcagcgggacgtcttcagaagttctcgtgccgctcggaaaaatccctacaatcttcccttccttcagaagcttaatcggcgttttaatgctgctcggacccggattttcacgatcaaccggaaacgcgtgaatcttctttaaaaaacttccgatccactttttctgaaacagctcttttttcgccatataatgaatctgatggggcaatatcccgacaccgagcgtgaggacgtccacccagcccgcatgcgtgcacgcgataacgaatcctttatcagacggaagattctctttattgtatactttgactcctccgcgcagagaaagaatgaatttgatggcatttgcacaaaacttatacataacgcacttcctttgttgtaatgatcaaaagtgttctctctctattataacaatattttttattacctggtactaataaatatatttttcctccgccgatctctatcttttatgacggattttgggtactatagagaaatggtgtttgatgaggtgaaaatgaatttaagccgtttgcatggaacgtgcaactttaaacctttcttatgcgtgtataacatagaggggagaaaaggcagtgacgatcgatgaaatttaccaaatgtatatgaatgatgtttaccggttcctgctctccatgacaaaagacaagcatctcgctgaagatttgctgcaggaaacctttatgagggcatacatacacattcactcctacgaccacagcaaagtaaagccatggctttttcaagtggcgagaaatgcgtttatagattatgtcagaaaacataaaaaggaagtgaccatttccgatgacttaattgggagcctttttcagacggctgttcaaagcccggctcatcagattgaaatcaaggaagtgctgacagggtatatgtccgaacttcccgacaattatcgggaggccttaacactgtattatttaaaagaactgaattacaaagaagcatcccatattatgaatatttcagaggctaattttaaaagtgttttatttcgtgccagacagcggctgaaagcactttataatagaggtgttaatgatgaatgaagaatttaaaaagcgtttttaccaatacaaaaatggagaaatgagcgaccgggaaatggccgcctttgaagaagagctggaaaagcttgaagtctatcaggagttgattgaaagcgaaatgcaggacgaccgggaatgggacgtcggcatcagcccggaaaaacagaaggccattttgtcatacggaaaacgcaaatcgtatttgcggatttcagttctcgccgtcatctccaccttgatgattttgccgctttgcactttgggaagctacctctattacggtttgggaggaaaagaaagcaccggcaatcaattaatggaaaccgcagccgtgacggtggcgaccaccatgccgaacgtactcgtcgatacctccggactgaaaagccaggtgaagctgtttgggatgaatacagagtttccgctgcaaaagcagatcggcacaaaaacgaaatccgtcggcggagaacggattgaaatgtttttagatacggtcaaatcgcctgccgttaactactatgatctagacgcggcacaggcaaagcattattttgcccatccttccggcttaaaggaacgcacgattgacaaagccggacagacattaaaaaaattgcctgaaggaagcgtggcggaggtctatctttcttatgaccgggcctatccttcttctcaagtatattctacttttaaaaaatacgatgtgaagtttttatggaacgcggtcgaaacggagaaaaatctgaaagacagtccttatgccgagccgttaggatttcccgggaaagattccaagatggtgtcctctttcgaaacgcaaggacagacagaccgtgaacaatttatcaatgcccttgaatttatgtcccgccataaaaaatgggcgcatgcaatatcgaaacgcaaagacatgaatcttggcagccgaatcgactatgttgaacatcacggaatgaacgtatacggctctgtcgtgacggggccgacaaaagaaatcgaacgtctgctgaaaaataaaacagtaaaagcagcaaacatcggtgaggtggaattatggaattggtaagaatttttaaagagcataatgttttcggctggatatcagtcggtaccgcgattttgtcgctgctgcttttgaacgtggcaatcatcagcaatgtgactttctattcttatcagatgctgccgtttgcgatggccgccgtgccgttcggcatcattgagctgtttattaaaaaaggacggacgggcccgggactgctcggtgtcatcctcaaccttttcgtcattgtttgtgtatatacgatcgttgccgttgatacgaatctgcaattcggtttttaaacataaaaacaggcccttttacaggggcctgtttttttaaaatgaaagaacgccgattaaatgcagcaatacgacgatgatagccagcggcacgaggtatttcagaaggaaataccacacctgaaagaaacgatagccgatggcggaaccgcttttcatctcggcgaacagctcccgcttcggtattttcagcgggatgaagattgatattaataaagcgccgagcggaatcagcacattgctcactgtgaaatccgctagatcaaaaaacgtttttccgaacaaatgaacatcaccgagcacaccgtatgataaacacgacggaattccgactaagaaaatgagcagaccgcttgtccacgacagcttcttccttttcgtttcatcacctttcccgacagtcgctacgataatttccaccatcgaaaaggccgaagtcagcgcggcaaagaaaaagaccgccagaaagctgataaaaaacagcgagccgaacggcagccggtcaaacacagccggcagtacggtaaacagcagtgtaggcccttcatccggtttaaatccgaacgaaaaaaccgccggaaaaatggccagtcccgcaaacagcgtgacgagcacattcatcacaacaatggaacccgccgatcccggaaggttttgggttttcggcagatacgaactgtatgtcaccatgaccgaaacgccgagcgttaatgtaaagaacgcctgtcctaaagcatataggatggattccggcgtcaaatcttcaaagtgcggaaccaataaaaatctaatcccctcaacggcatgatcgagcgtgactgatcgcagcaccagcaatagaaacagcacgaataaaaccggcatcagcaccgcactgacacgttcaatccctttctgcacgccttttgcgacgaccgccactgtcaagatcataaatacaagctgcgcggcgagagtctggatcggattttcaatgaccgtcccgaacaccgttccgtactgctcctgagtgagcccggataaagaacccgtaacagcttttaacacataaagcaaaatccacccgccgacaacactgtaaaaagacaaaactaaaaaacaggccgccacacccacataacccgtgaggtgccataccgacttcggcgcggcttgtttgtaggcatcaatcgcatttgtctggctccgtcttccgaaaataaattcaccgagcaaaagcggatagcctaaaagcacggtaaagaggacgaatacaagaaaaaaagcgcctcctccgttcgtacccgctacgtaagggaacttccaaatggctcccaggccgatcgccgaaccggcagcggccataataaatcctatttttgaggcccattgaacccttttttggtcagacacgactttccacttcccttccgccctatattatcccttattcactgcgataacttaagcccatttcaatatgtttcattattccgaaaaataaaaaggagcggcgggtgccgctccttacaaatccccgtttaatttcgaatgctttctcgaatataagaaataaatcaccagaccgatgatcagccagataaagaaacggaatatggtggtggcgccaaggttaataatcaaaaatacgcagaacagaatggacaatatcggaataaagggaacccccggacatttaaaagctctcggcagatcaggctgtttctttctcaatacgataaccgccactgaaatcaggacaaacgcggcaagcgtgccgatgttcaccagcttcgccagctcatcaagcgggacgagcgagccgagtaatgccgacaggatgccgaacacccatgtcaccacgtgcggcgttttatgcttcggatggacttttgaaagcgcccccggcaccaaaccgtcacgggacatggcaaacatcaccctcgtctggccgtacagcatgacgagcatcaccgttgtcattcccaacactgcaccgatatcaataatcccggccacccaattctgtccggccatctgcaggacgagagacacgggatggtcaacgccttcaaagcgggcaaacggaacgacgcccgtcataatcgccgatacggtcacatacagcacggtgcagacgattaatgaaaagataattcctttcggcagatccttcgccggatttttcgtttcttcagcggcggaagagacggcgtcaaaaccgataaaagagaagaaaacgagcgccgcggcactgaaaacaccgccgaaccccatcggtataaacggctgccagttgtgaggtttgacatatacggccgcaacggcgataaacaatagaacaaccagaaccttcaaaatgaccataatattattgacccgcttcgattccttaatgcctaagtagaggaggaatgtaatcgcaagcacgataacaaatgcggggagattaaagaatgtgaccgtgcctttaatggatcccggcgcggccgttaatgcggtcggaagatgaatgccgaagcccgccaagaatgattgaaaatagccggaccagccgaccgaaaccgcgctgacggcgagcatatattccaagattaaatcccatccgatgataaatgcgagaagttcacccagtgtcgcataagtaaacgtgtagacggaaccggaaaccgggacgcttgaagcaaattcggcatatgacaaagccgcaaataaacacgcaagagcggcgatgacaaatgaaacggtcagccccggccccgccgtgacagcgcctgttccggttaatacaaaaattcccgttccgatgatggcccctatccccagaagtgtcaaatcaaaggcccctaactctcttttcagcgacttttccccgcccgttgcggcaagcaggtcctgaatgcttttctttctgaatatgctccccttcatctgcttcactccttgtaaatcaatatatgttagaatattcagacaacaatagcaataatgactaaattcttatttttcgcatgaaatgtttcagcacatcattcctttctcctacaccatattatagcgaaaaatataaaaatgaaaataacttttttgaaaattctatatattatttcagttttcataaaacagaactcagcggattctccgctgttaaatattaacattagtaattcagctggcggcttctattttttaaaaatcgtattcatatgtaatcaaataaaaatcccgccctttttaaaagcgcgggataagacttgcttattatgttgaaataaacctgcctccatttacgtgaatggtctgcccagtcatataggaagattcgtctgaagccagaagcacataagctcctgcgtgttccgcaggctgtcctggtcttcccatcggagtgtccagaccgtgcttttccaccttttcttcagtaaacgttgccggaatcagggcggtccagatcggcccgggtgccaccgcatttactctgatcccctgatcggccaatgacatcgccattgaacgcgtaaaggaaacgatgccgcctttcgtgcacgaatagtcgatcaatgatgtgtctccctgataagcggtaatcgacgttgtattaatgatggcgctccctcttttgagatgaggcagcacggcttttgtcatatgaaacatggaaaacatgtttgtacggaatgtcttctccagctgttcagccgtaatatcaagaatcccgttttgcggatgctgctcagccgcattattaacgagaatatctatttttccgtagtgatctaagacttgctggaccgccttctgacaatgcgcctcatcaccgacgtctcccggaattaacaggcaatcggcctggtattctctcgcacgctttttcgttctctcggcatcggcatgttcgtctaggtacaggatggcaagatccgccccttccttcgcgtaagcgatcgcagccgctgcgccgatgccgctgtctccgcccgtaataacggcgacttttccttttaatctgcccgacccttttacatccggatcctccaagagcggttttggctccatgtctgactcaatgccgggctggcggttttgcacctgcggcttttgtccttccgtctgtctgtccatcggattcatattctcacactcctgcaattggtattactgagacgataccacgcagtgcggggagttaaacggacaaatatgccggtaattaaagctgctgagccgtttcgggaaaagcgccggtgtatttcgcagacggtctgtaaatcatgttgtcagcggactgttcaagcacatgtgcgcaccagcctgccattctgcttgctgaaaaggtcggcgtaaataaatcattgtcgacatcaatggcctgcatcacagccgctgcgtaaaactccacattcgtatacagcttccgtccgggcttatattgctctaacaagcggatggcttccttctccacataaagcgccaagtcaagcgacggatcatttcccgccacttcttcagcctttatgcgcagcgcttccgcccgcgggtctttcgttttgtacaccctgtgcccgaagcccatcaggcgttctcccctcataagcttcgctgtcaaatacgcttctgcattttctttttccccgatgtcttcaagcattttcgtgacgcctgaaggcgcgcctccgtgcagcggccctttcatcgtacccagtgcggcagtgacggcagacactaagtccgattcagtcgaaaccgtgactctcgctgaaaaagtcgatgcattcatcccgtgttccatcgccagaatcatatacgtctcaagcgctttcttttgggctgcggacggctgcctgcctgtcagcatatacaaatagttttcaacgtgtccgtatcgcgcctcgggtgacagcgcttcctgcccttgtttacggcggtatctgtacgcaataatcgtcggtgtgacggcaatcagtttaatcgcttcttccggcttgggcggatatgtaaatgaatctgtgcccaaacctgaaacagccgttctcagcaccgccatgtcgtccatttcatccggaagcgtttccagtaagccgatcaaatgtttcggaagcccgcgctcggctgcaagttcttcctgaaacgcaagcaattgccgctcatcaggaagcgccccgttcaaaatgagatacgccgcttcttcaaaactgaattgcaatgcgatatccttcgcgtcatagccgcgatatattaaatgccccttttctccgtcaatgtggctgatcgccgtttctgcacaagtaatccctttcaatccacgataaatcaatttcattcccccttatcctctttctgttattatagtaaatataatatttaaaaaataatgaatatttttaagggaattaattaaaacttttaatcagaggagtgcatctatggattttaaatggcttcacaccttcgtcaccgcggcaaaatacgagaatttcagaaaaacggcggaaacgctttttttatctcagccgaccgtcaccgttcatataaaattattagagaaagaaatcagctgcaagctgtttcagcggagcggccggaaaatacaattgacggaagaaggaaaagcatacgtgccgtttgccatgagacttttggaagactatgaaaacagcatggcggagctgcacagggtgcgccagggctactcgcacacgctgacactcgctgtttcgccgcttatcgccgacaccgttctcccgtctgtcatgaagcgttatacagaggacaataaagaaaccgaaatgacggtcaccattttcgaatcggaagaaatcgcctctcaaatcagaaacggctcagccgatatcggactgagctgcttaaaggtgcaatcatcttccctcacttgcctccccctgtacaatgaccccgttgtcctcgtcgcgccacccggccgaaaacccgggacagggaaggcggatgaagtgaaagacctgttcggacaatatctgcttttgacccataaccatcctgactattgggatgatttgctccgccaggtcagaatacagttccctttcgtcaggacaatgaaggtgacacagacgcatattacgaaacgatttattaaagaggggctgggcgtctcatttctgccgctgtcagcggtacggtccgaactcgccgcaggcagcatgattgaaattccgtgcgaattcgcccagatgccgagcgcgggcgcgtacgccatcgccctctatgaaaatgaaaaaaagaaaacctttttagattttttatcacattttcatttttaggtgaaacaaatggagctctgccccgtctaaataaaaaacccgttcggatgaacgggtttctctcactgctagaatcttttcgcgcccaggtagcgcggtttccagtagctgttattcagatcacttgttgtgacgccgtcagaaccggcatggatgaacttgttgtttccgatgtatacacccatgtgtgaaggaccggcttgatatgttgtaaagaagacgaagtctcctcttgacgggctggatacgctcttcattgagctccagtatcccgcagtgcttgttctgccgacactcgtctgtttgtttaacaggtaccagataaatccgctgcagtcaaagccggaagtcgttgttccgccccatacatacggcgtgccgattaaagattgcgcatcagaaaccagcttgtttacattcaggctcgtctgtgcaatattatggctggatgaaggcttctttgatgacgaagatcctgaagacgctgaaccggaagttgatccttttactttaagcacttgtccgatgcggatcaggtccgtttttaaaccgtttaaactttttaattggtttaccgtcattttatatttattcgcaattttccaaaggctgtcgccttttacgactttatatgtagacgatgatgacttgctgcccgaatttgaacctgaagatgatttaccgttgatcgaaagcgtctgaccgatgtaaatgatatccgattttaatttgttctcagatttaatggaattaattgacgttccataccgatttgaaagtccccataatgtatcgcctttttttaccttaatcgtttgcgcagacgccgcgcccgcaaacaaagtcgtccccaaaaccactgccgttgttgctgtaacaagttgctttttcatattttcctccctgaatgattctatctattttatgtgtctcttttttaaagtttttatctgtttcctattataaggttcaatttccactagaaatagacttgacttcccgtgacaaatttcttactaattcgtttttgaaaaaagtttttaagggtattaaatatttcaatttgatttcaaacgtgacgaaaaacgagtcaatttgtcatgtttttttcctgtgatcctcgtattttggaaaaacaaagcagtttactttccaaataactccttgttaaaaaaatcctcgtctttttcaaaaaagtgaatggttttcactctttcttgaaaacataagttacaccggaatttacatttctaacaatgtttcacctgaaatttacaggaggaacaggcgctctttacaaacaccccctaccattagacatgcagacacgattaaaggaggacgagtgagaatgagtctatttaaacaggttcgatcaaaacttctgccggcggcagccgtatccgtgctgacagccggtctgattgcgggcgcggggtttcagcactctgaacaggctgcggcaaaaaaacagcctgacaaaaacgagatcagaaacgtcatcttcatggtcggcgacggaatgggcgcaccctatatgaacgcctaccgttcggtcattaacaaaggaaagccttcggatggtatgaaactgacggcattcgaccccaatctcgccggtatgatgatgacttatcctgacgatcctgattccaatattaccgattccgcggcggctggcacggcaatggccacgggcgtgaaaacgtataacgcggcgatcggagtcgataaaaaaggaaagcgggtcaaatccgtcctcgaagaagcgaaacaaagagggaaatccaccggacttgtcgcaacttcggagattgcccacgccacccctgcggcattcggagcccataacaaatcccgaaagaacatggatgagatcgcaagcagctactttgatgaccgcatcaacggaaaacaaaaagtcgatgtgctcctcggaggcggcaaatcaaactttatccgtaaagaccgcaatgtaacaaaggatttcaaaaaagcgggatacagctacgtgacatcaaaacaggagctgaaaaaggaccgtaacaagaagattctcggcctgtttgccgatggcggactcgacaaagcaatcgaccggtcaaacgctgtcccttcattagaagacatgacaacggcggcgatcgacaggctgaacaaaaataaaaaagggttcttcttaatggtcgaaggaagccaaatagactgggcgggacatgacaatgatatagtcggcgcaatgagtgaaatgaaggattttgaaaaagcgtataaagcagcgatcgcatttgccaaaaaggacaaacatacgcttgtcgttgccacggctgatcataccaccggcggattgacgatcggcgcgaatgacgataaaaactggcatgttgaaccgattcttgccgccaaaaaaaccccggcatttatggctgaccaaatcaaagcgggcaaatccgtatcttccgtgcttgcgcgttatacagacctgaaatggtcaaaagcggaaattaaacagatcgaaacggccgcaaaacaggatgctgacaagagcgtctacaaagcgatcattaagctttttaatgcgaaaacaaacagcggctggacaaccggcgatcatacgggcgaagaagttcccgtttacgcatacggtccgggaagagagtcatttacggggcttttaaacaacacggaccaggccaaaaagatctttcacatcctgaaacacggaaaataaaaaaggatgcggggatttccccgcatcctttcttcttttacaaatatctccggtgcactcctttgccgtcatacgaaaacatcacttctctgtcttcaagaacagattcgatgtgcacgctcctgccccacagctggtacagatacggcagcactttctccaaatatttcagatcaagctcaattccctcataccaatgtttaatataaagctcattattcttcaggtaatccccgtcattgacggtcagataaggaaatcccccgttgacccgcatgttcacgagctggtcgcgcacggccttccattctttgtcgatcactttatagtccctgccctgcttttggaataaatacaaatcctcacgcataacgagatctttcgtcaaataattgcggataaatgatatgtccgattcaatttccctgacctcaaacattttctcgcggccggaaccgggctttacccctgtttttttcatttcatctgtcgggttgtcataacgctcttcgatgtcttcaaaaattttcagccctaaataatacgggttgattcccgtttttgacggctgaacgacgcctgcgttcagcttcgcaaattcgatggcttcatctgaagtcaggtcaagctcgcggataatccgctgatgccaataggatgcccagccttcgttcatgattttcgtttccagctgaggccagaaatacagcatttcttctctcatcatggttaaaatgtcacgctgccacggttcaagctcccgcgaatgttcctcgataaacagcagaatatctttttccggacggggcggaaacggttttttccctcttttctttttcacctgtttcggcttatccattccccataaatcatcgtaaggcgatggcgcggtttcttcttcgtcctcctcttcgtcatcgacgctccacagcagcttcggcctgacgagcgacggatcgatatgctcctgaatcgccagaatggcatctaaaaaggactccacctcttttatcccgtgaattctttcataatgcttaatccgctccgccgcagccgccatactctcaaccatgtcccggttcgtattttgaaagcggcagttatttttgaaaaaatcacaatgggcaagaacatgggctacaattaatttattttggatcagcgaattgctgtccagcaaaaaagcgtagcaagggttggaattaatgacaagttcataaattttgctcaaaccgagatcataatggagtttcatcttatgaaattgtttgccgaaactccagtggctgaatctcgtcggcatgccgtacgcgccgaatgtataaataatttcagccgggcaaatttcatatctcatcgggtagaaatcaaggccgaaaccctttgcaatgtcggttatttcctcaattgcccgctgtaaaccttttgtctcctccgcgttcaagcgaatcccccctacttggacttatttataatgtatgacccctcctctcaaaagatgaaataacagaccggtttccgactgaaaactttcggcacatccgccctgtttgctttatatgtaagtgggtaaaacacacaccataccccaaaaagaaaaggagcgattctacttgaatacagcagacatgcttacgacgtatctcagcaaactcccgaatctgatcattgcactgctcgtcctgcttatcggctggggcattgccaaaatcattgaaaaagccgtatacaaaggcctgcaaaaaacaaaaatcgacgacaggctgttcgccgaaaaaaagccggcgcgctattcctcagaaaaagtcatcagtaaagtcatttattttatcgcattaatcatcgtttttattctattctttaacattctgcatctgacaaccgtggcttcgccttttgtcagcatgctgtcggcgataacggcggctgtgccgagcgttttaaaagccggcttgattctgctcgtgggctgggcggccgcttcgcttttcagctatctcgtcaaaaaagcgggcatgaaactcgctgaaaacggccggctcagaaaatggacaatggtgtctgaagaagcggagatgagcagatccgttacggccgcttcacgaatcgttttttacttcgtcttgctcttgttcctgcccggcgtcttgtccgctctccagatcagcggagtgtcagggccgtttacaaatatgattcaaagcgttttgtcctttataccgaaattattcgccgcggcgctgattgttttaatcggctggcttgttgcccgtctcgtccgtgatatcgtcacaaactttctggcgagtatcggaacggaaaggctcgccgcacgtatggggctttctatttatctgaaggatacgagcctgtcggcaatcatcggaacgattgtctacgtgctgattttcattccggtgatcatctctgcgcttgaccggcttgatgtggcgggtatttctgaaccggcgtcagccatgctgcacacggtcttcacaatgctccctaatatcatcatcggtattgtgctgatcatcgccggcatctgggtcggaaaatgggtcagcagcattgtatccgggctcctgcaccgggccggtttcgactctcttctcggtaaaatgggctttgaacaggcgggcaccccgaagctgacgctttctcagacggtcggcatgattgttcagatcatcatcgtcctgctctttacggcagaggcgctgcagcttgttcatctcgaatttctcgtcgttatcgcaaccggtattatcgcttacctgcctaatgttctggccgctgtatttattctcggaatcggacttttggccggacagcttgtcagcaggctgcttgccggcatgctgagcggaaaggaattcagattcctggcgccgcttgcgaaatataccattatcactctctcaatctttatggcgctggatcagctcggtgtcgccgacacgatcgtaaatgccgcgtttattctgattctgggcggtttcgcgcttgccttcggactttcattcggtcttggcggaaaagaatttgcctcccgttatctcgcaaaattggatcgcaaaattgaaaaacatcaatcggctgacgatcgtaagccgccgatgtcttaacgaaaaaaacgtgtgctcagaaggagcgcacgttttttttgagttaagggggcaaattccttttttttcattttagattcatatatgatagactgtaacagaagcaaaatctcttttttcgaggtcattctatgaaattaacgaactataccgattactctttacgcgttttgatttttttggcttccagacattccgacgaactttccaacataaaagaaatcgcagatacttattccatctctaaaaaccacctcatgaaagtcatttaccgtctcggccagctcggatatgtcgaaacgatccggggccggggaggcggaattcgattaggaatgacaccggaagacataaacattggagaagtcgttcgacatacagaagacgactttaacatcgtagaatgctttgactccaaaaaaaatctctgtatcatatctcccgcctgcaacttaaagaaccttctgaatgaagccctgcaagcttacctggccgttttagacaaatatacgttaagggatctggtcaaaaacaaagaggagattatgagactgctcagaagctgaaggaatgtccgcattccttctttttttatgccggcataagaaaaaaggactatttctattaatatgataaacgattgcagacaagtgccgatataaagattatcattactgatatcctcaccttgcggctgcaacgaatggggatagaaaaattatcgcaggaaaagggagattcactatgaaaaaaaaggtagcggtcggtttgactgcatctgcgatcgtcgggtctgcgttagctgtaacaccggcagaagcacaaacgattaaggtcaaaagcggagattcattatggaagcttgcccaaaactacaatacaagcgtggatgccattacatcagcgaatcatctaaaatccaccgttctttctatcgggcagacgctcaacattcctaacggcaaatcagattccggcagcaaaaagccatcttcaaagaacagcggcacgactaaaagcgtctatacagtgaaaagcggagactcgctgtggctgatcgcatctgattttaaaatgtccgtacaggaactgaaaaaattgaacggtctgacaagcgacttaatccgcgccggacagaagctgcaagtgacggggaaagtttcctcaagcaccgatcagaaaaaaaccgctcctggcagcagctcaaacagcagcaaaaagcagtcatcatcttccgggacctataaagtaaaactcggcgattcactatggaaaatcgcaaacagcgtcaatatgaccattgcggaactcaaagtattaaacaacttaaaaacggatacgatctacgtaaaccaagtcctgaaaacaaaaggaacgtcttcttcgggaaacacgccgtcaaaagacaattcaaaccaaaatcaaaaccagacgcaaacgtcctcctatacagtaaaaagcggagactcactctggaaaatcgcaaacgcatacaatatgacggttcagcaaatcagaagcatcaacaaactgacgtcagacatgctgcgggtcggacaagtgctgaagctgaccaaaacgtcttcttccggctcttcgtcttcaccgtcagctccgaaccagtccggaaatacagggaaaaccactacatataccgtgaaaagcggggattctttatgggtgatcgcccaaaagttcaatgtgacagcccagcagatccgcgagaaaaacaatctgaaaacagatgttcttcaaatcggacagaaactgacgattaccgggcagcagacaaacacgacaccgaatcagtccggcagcacaggcggcacaggttcaacaagcgcgaagattaatgtaatgatcgatgccgcaaaagctcagctgggcgtaccgtatgtatggggcggaacgacgccgagaggctttgactgcagcggtttcatttattacgttctcaataaggtcacttctgtatccagactttcagccgcaggctactggaatacaatgacatcagtcagccagccggcggtcggtgactttgtctttttctcaacttataaagccggaccttcccacgtcggtatttatctcgggaacggccagtttattaatgccaacgattcgggagtcgttatttccagcatgaacaattcctattggaaacagcgctacctcggcgcaaaacgtttcttctgatacctgataagctgtacggccgcataaggctgtgcagcttttttacagtctgaaaatattgatgctgatcacgtgttttgttacgggatggaaatacacttcagcacgggatgaaaacgtttcttttgcggtttgcaccgttacgcgaaacacgtctttcgtctgttcccggttcacttttgtacggcccatgtacgaataatcggtaagctcggcccccttgtattcacgttcaagctggttccatgcgagctgttcccatttttcaactgacggatcgaggtgttctgtatgccctttttcagcgatagaggcaatgagaatgccgcaaaacaagagggcaagcgcaaatggaagggatttcatctttatgttctcctgagtcgttttttgtcaatcttagcgtgtccaaagaagagacggatatgcggttttattttatgtctccctcatattgctatgccgcagtgataaggacaccaagttttcccccgttgcatccgggcttcggcggcataaactaacggagaacttctcattgaaaggagaagcgtaagatggatcatgccgattatgataaagccttgtattacacacaccggtctcaatgggacaatttattaattttgatggttcgtacaaaagatgatttattatcaaagcgtattgagcactttctacacgcgtatcatttcgaatatgatcatgccgtgcttgaaaaagagctgtattcccttctcgggtatattgatcatgcgacagagctcgcttatgaagatcaattagccatgctgacataaaacaatcccggcgtcagacgccgggatttcttgtgtttgtgaacatattcagctcttcgatcatgtctttcaggctgaccgccatatcctcagatacggtccggcgctccatgtcgatgtgaatcgggtctaagaccagctgtttcgggatgacatttgcatagacgccccgcatgaccgtccgcatattcgccagcgcattcatgcctccttttcctccgcccgccgcggcaatgacggccaccggtttgtatgcccagtgatcgctgcttaaaaaatcgatggcgttttttaaagcgccgctcatgccgctgtgatactcgggagataataagacgacggccgctgactttttcacctgccgccttaacttttgcactgaaggcagctcgttctgttcttcttcaccgttataaagcggcagttcactttcgctcaaatcaataaaatcggtatgaaaccgatctctgatataagaagcggcaattctcgtccgcccgttttttctcggtgtgccgctgatcactaatatgctcatgattttaccgcctttcccaaaacattatattttaccgcatacaatgccgcctgcgtccgatcggaaagattcagctttgacagcaggttggacacgtgggtcttcactgttttttctgaaataaacagggccgccgcaatttccttattgctttttcctttggctatttcttgaagaacatctttttcacgggggatcagctgataatatttttccttatcctgatcatcctgaaccatatgggtcagcacgtgaggcacaatatccgaacttccggccgccgtcctcaagcggtacggtcgcatgatgggtaatgccctccgtatcgcggcagttcgtcgtctgttccgcaaattcaatccgtttgcaattcattatgtttacggcctttgtcaatccgccattgctgaatttggtcagacaatagcattccccgctgcacatgagtgcattttcccgctgaccgagagcaggcggtaaataagcggatgcggcgagcgtataagacccgtccggctcaatcagaaaaatccaccctgtctgcagtccggtcaggctgagcagttcgcggagcactttatcaagcgcttcctttaaatcgtggttttggtttaaggtttccgcaatcgcttttaacgtttttaacgtttctaccgtcgttttcgtcaatttccctcactccggccaatcagaattatccatattatatcaattcttttctgtatattcctttgttttcagcatgaattttcctcatactttcggatgaggcgtataaaaaaaccgccggatgtcgcttccggcggtttgttgtttatttcgttttttccactatgccatccaccgttttcatgacggcttcagataatgcggcaagacgctgttcgctgtcttgtaaagaagtccccttcacggcgaaatagaacttcactttcggctccgttcctgatgggcgaaggcagaaccaagagccgtcttcaaggaaatatttcaggacatttgacttcggcagatcaatatcttcttcaagatgatcggcaaatacagtccgttttcccgttgaatagtcttcagcctgcgtgatttgttttccggccatctgcttcggcggatcgtttcggaatgaagtcaggatagcggaaatctgctctgctccctgtttcccttttaacgtcaatgacttcaagccttcacggtaatatccgtattctttaaaaatggacagcagcgcgtcataaagcgacatgccctgctttttataaaaggcgcatacctcgacggctaacagcgcagcctggatcgcgtctttgtcacgcgcgaaatcgccgattaagtagccgtagctttcttcatacccgaactggaacgtgtattggcctgatttttcatattctttgatcttttcaccgataaatttgaagcctgtcagcgtgtcaaccgtatctaatccgaacgatgaagcgacagcgcggcccaattcgctcgtgacaatcgttttcatgacgacaccgttttcaggaagggtgccctgttttttcttctcggaaagcaggtaatgcaataaaagcgcgcctgtctggtttcccgtcagcactgtgtacttgccttcgctgttttttacggcaatgccgagacggtcggcatccgggtccgtagcgacgagaatatcggcattttgttcttctccgagcttaatggcatattcgaatgccgcgtgctcttccggattcggcgatttgacggttgaaaaatccgggtccggcagctcttgctcctttacgacggtgacgtttttgtaaccgagtgcttcaagaccgcggcgcaccggtttatttgccgtgccgtgcagcggagtgaacacgacgctgacatccacttcatccgaaagctcgggatgtacggagatggaagtcagtttttcagtatacggtttatcaatttcttcaccgattattttaatcaaacctttttctttcagcgactgttcatcttcaacttgaatcgttaattcattttctatggcattcacttccgcaatgacgatgtccgcttctttcggcggcagctgtgcgccgtcatcgccatacactttatatccgttatattcaggcgggttatggctggccgtcacgacgatgccggcataagcgttcagctttctcaccgcaaaagacagctcaggcgtcgggcggagctcatcaaagacgtatgtttgaatgccttgggaagcaagggtttttgcagcttccatcgcaaactcaggagatttatgacgggagtcgtatgcgatcgcaacccctctttttttcgcgtcttccccctgtttcgcgatatacgccgcaagtccggcggatgctttgcggaccgtgtaaatgttcattctgttcgtacccggcccgatttctcctctcatgcctcctgttccgaactcaagatttttgtagaaaaaatcttccagcagctgctcgtttccttctgcgtccgccaataattttttcaattctgaatctaattgttcggcctgattccagcgttcgtaactcttactccaactcatgttcgtcctcctataatttcagcttatgaccatattttaatatgaagcggctgcccgtgtcacttgataacttaaccaaatgctttatgtaaaaagataaaagaagggctcatgccttttcggcacagccctccggttattattgttcgagcggaacaaccgcgtcgtgcagcagcgtatttaaccactcagtgtgtttttctttcgtttcgtcattccattggaatcggtcgctcatgtaatcaatcacggccgttttatacgtttgcacccatttgatgtcgaagaacagtcttcccgttctgcggacgaagaaatcggcaggtgtcgcagccatttcttcttcgatgctgtaagccgcttccgccagaatgtgaaccggaatctcgcgtttttccgcttcatctttcaggccttcaatccggctgaatacattttcaacgttagagccgtatctgatggctaactgcttagcggtttcctgtgataaaccgattttcaagccgtcttttgtctttgcttccacaaatgactcgaagtttttagagccgccgacatgtccgccggaaatcggcatcgtcttcgtcttgcagccgccgaagtcctggccgccctcttctttcaagcggtcgcggacaagatcgacaatgtgctcagccattttacggtagcccgtcagttttcctccggcgatcgtaatcaggcctgattgagatgtccagatttcatctttacgggagatctcagacgggtctttcccttcttcgtgaataagcggtctgaggccggcccagcttgattcaatatcgtccgccgtaatgttcagttccgggaacatataattgatggagctgacgacataatcgcgatcctgcaccgtcatgcgcgggtgctcaagtttttgtttgtaaaccgtatcggtcgtacccacgtatgtttttccttcacgcggaatggcgaacaccatccggccgtccggcgtatcaaagtacaccgcctgtttaagcgggaatacggattggtcgaatacgagatggaccccttttgtgtgctggagatgttttccgcttttgctgtggtctttttctctcagttcgtcgacccacggacctgtcgcattgacgatttttttggcgtacactttgtattccttgcctgacagcagatcttcaattaaaacgccgacaacttttcctttttcataaagcagttctttcactttagaatagttgacaggctcagcaccgaatttaacggcttctttcatgacttcaatcgtcagtctcgcatcgtccgtccggtactctacataatagcctccgccttttaagccgtcttttttgacgagcggctctttttgcagcgtttctttagcagacagcatgcttctgcgctctgatttttttactcccgctaaatagtcatacacacgcaggccgattgaagtagagaatgaaccgaacgtgccgcctttatgaaacggcagcagcatccattccggcgtcgtgacgtgcgggccgttttcgtacacgatggcgcgttccttaccgacttcagccaccattttgacttcaaattgcttcagataacgcaaaccgccgtggacaagctttgtggatcggcttgatgtgccggccgcgaaatcctgcatttcgctcaaagcgactttcattccccttgaagcagcgtcaagcgccgtaccggcacccgtaatacctccgcctataataaacagatcgtatgtttttttagtcatgtcttccagcatatgatcccgttccaaacttgaaaattggtgattcatcattacgcttcctccttgttgtcacggtatagaaaaagagaccacaacagccaaagcgcatgtcatcactttggtgctgtggtctctcctcatctcaggaccgttcctattaacttgttttcagtataccataattttatcttatttaaaagccatagctgcatttactgcttttttccatccgccgtacaattcaacgcgtttttcatcttccatttccggtttgaattgcttatcaaggttccactgatcggcgatttcagtgctgtccttccagtagccgacagcgattccggctaaatacgcggcaccgagcgcagtcgtttcattaatttccggacgttcgaccggcacatcaagcaagtcgctctggaactgcatgaggaagttattttttaccgctccgccgtctacacgcaatgtttttaaagagatgcctgaatcagcctccatggcatcaagcacatctttcgcctgatatgcgagagattcaagcgtggcacggataaaatgctccttcgtcgttccgcgtgtcaggccgaaaactgagccgcgcacgtcactgtcccagtacggtgtgcccaatccgacgaaagcgggcacgacataaacaccgtcagcggaatccacacgctctgcgtatgtctcgctttctttcgaatcctggaacatccgcatgccgtctctcagccattggatggcagaacctgcgacaaagatgcttccttccagcgcatactcgacttttccgtctaatccccaggcgattgtcgtcagaaggccgtgatcagaagtgatggctttttctccggtattcatcagcataaagcagcctgtgccgtatgtgtttttccccatgccttcttcaaagcacgcctgaccgaacagcgcagactgctggtctccggccgctcccgcaatcggaatatttttaccgaagaaatgataatcaaccgttttcgcgtacacatgagaagacggtttcacttccggcagcatggatttcggcacgcctaaaatatcaagcagctcgtcatcccattttaattcatgaatattaaacatcagcgttcttgaagcgttggaataatccgttacgtgcgccgcgcctccggacattttccagatgagccatgaatcaatcgttccgaacagaagatttccgttttccgctttttcccgcgcgccttctacattgtcaagaatccatttgactttcgttcctgagaaataagggtcgatcaaaagtcccgttttttctctgaatgtatcattatatcctttttcacgaagctcttcgcaaatgccggatgtttgtctcgattgccacacaatcgcattgtataccggctttccggtatctttatcccatacgaccgtcgtttccctttggttcgtgatgccgatgccggcaatttgatcagcgctgattccggactcggaaatcacagtcgcgataacggcgagcaccgatccccagatttcgttcgcattgtgctccacccagcccggctgagggaaatgctgtgtgaattccttttgagcggaatgcacgatttttccttctttattaaaaagaatcgctcttgaacttgttgtgccttggtcaattgataaaatataggtctccatgatgccgctctcctttttaaatatattcagaatttgataatgttttctgtgattgagatttcttggtataaatatagagtatgaaaagcactacaaccattataacgcttacaaaccaaaagctaggtgtcacatttcctttaaacgcggcattgtaaaatacgccgccgaacgcaccgcccatgatcggaccgattacgggaatccaggcatatttccaatttgacggcccttttttcgggatcggcagaaaggcgtgagcgattctcggccccaaatcccgcgcagggttgatcgcatatccggtcgtccctccaagagaaatcccgatggcaacgatgaggaatccgacaatcagcgggttcagcccttttgtaaattcattcgctccgattgccaaaatgccgagcacaagcacaaacgtaccaatgacttcacttatcatattcccaaatgtatggggaatactcgggccggtcgagaaaacgcccagtttagcggccggatcatccgtcgccttccaatgcggcagataatgaaggtacacaacaaccgcaccgatcattgctccgatcatctgtcccgcaatataaacagggacgtctttccaaggaaagctgccttcaagcgcaaggcctatcgttaaagccggattcaagtgagcgccgctgatgctgccgacggcatatgccgccatggctactcccaatccccagccgaatacaataacaatccatccggattggtatgaaagcgatttctttaagttgactcccgcacaaacgccgccgccgaaaataacaagcagcattgtaccgattacttctccccaaaatgctgtcatcatcattcctcctaaatgacaaaatagcaggtttgacagagttatagagaataaaaaacccacaacaaaccgctttacgctttattgcttccgtaaagagctgttgtgggtctccgggtctccatcacatagtattaacctaggtctattgtaacaatgggtgtaagcggtgtcaatctttttttgtcatagaatgttcatatttagcccatagttcggtgtctgaagtcgtcacggccgtggctcctgcctgcaaggcgttttcaacgtcctgctccgtgcggatgaagccgccggcaaaaatcggaatccccgtcatttctttaatttctctgattaaagtcggaacgatgcccgggagaacctcgataaagtcaggcttatgctttccgacgaattccatgcttttttccatggcgctcgtatccaagagaaacagacgctggatcgcgtatattttcttttgtttcgctttgacgatgacggcggatctcgtcgaaatgatgcccgcgggccggatgtcctgacaaatgaactccgcaccgtattcgtcatgcttaatgccgtgaattaaatcgacgtgaaccatcagaagttttccgtgttttttcgcttcattcacgacaccttttaattgaccgaggtgtatatctaaaatgacgccgtataagaacggactctctaaaaatgcatcgaattgcttcatgttccggatagccggtagaatcttctggttgtgaaaactcatgttttactcctttactttaaaaatcaatgctcagcacgctttccttgacggtcgaaatgatgaaagagagctcctcgtcggacaggcaaaaaggcggtgacagctgaatgacattattatatcccgctacagtatcaccatttttcccgacaagcaggcctttttctctgcacgcggtgatgacgtgctgcacaagagcggcatcagcgggttccttcgtgattttgtccttgacgagctcaatgccggcaagaaggcctttgccccgtacatcgccgaccgccggatgttctttgagcggctcaagctcacggagcagccgttctccaagctcccgggagcgggcgatcagattttcgtcctccatcaattgcaggtttttcaaagcaagggcgcaggctgccggattgcctccgaatgtattcacgtgccggaagcggccgtacggctcaccgcccgaatacgcctcaaaaatctcccgttttactgccgttgccgacagcggcagataagcgctcgtaatgccttttgccattgtgacgatgtccggtgaaacgccgtaatgctgaaatccgaacggctctcccgtgcggccgaaaccgcaaatgacttcatcactgatcagaagcgcgccgtggcggcggcaaatgtcctctacctttgccatatacccgtccgggggcatcagtatccctccgcctgtaataatcggttccataataacgccggcaatcgtttcgcttaactcccacgtcatgatccggtcgatttcatgcgcgctttccaatgtgacggcatcgccgggattccgataaagatcaggcggcgccgcgtgcaaaaaaccttgtgagagcggctcatatttatattttctctgcgcctggccggtagcggcgagcgcccccatcgtattgccgtgatagcctctgtaccgggagatgaatttgaagcggctgtgatcgccgttttcaatgtggtattggcgggcaattttgaacgcggtttcatttgcttccgatccgctgttggaaaagaagattacataatcgccgccgagccattcattcagtttttccgcaagctcaatcgcgggttgatggctttgggtcagcggataataaggaagctccttcaattggctgtaagccgcatcggcaagctcctttctcccgtatccgatattgacgcaccacaatcctgacatgccgtccaaataccgtctgccgtcaatgtccgtaacccaggcgccttcccctttttggacgattatgctgtcatccggctccgcccctttcatcgcgtgccaaatcagctctttatccttttgtttgagtgactgatttttttgtacatgttccacaccgctcatctccctttcaatatcattgcactgtatcgaaagctgcccggcttctgacgccgattctcatggtgaagttttcctcttaataagaatataaaggcgcggcatgggcgagtcaataaagcggcggcaattaaaaaaacgctttctcccagaaagcgaaagggctacaagagcatatcccgaaaccggggccggtgcaagtgtttttataaaaaaacccgcccttaagcggggcgggcgtttttttatttcagatgcgtaatccggtaaatgtctttgcgccggtctttcagctggcgcacggttccgttttcacgctgccttcttaagatttcaaggtccacgtccccgatcacgaccatttcgatattcggattcgtttcaccgacgattccgtctctggcgaattcaaaatcagacggagcaaaaatggctgactgcgcgtattgaatatccatattttctgtttgcggcaggtttccgaccgtacctgagatgacggtgtaaatttggttttcaaccgctctcgcctgagagcagtaccttacgcgcaaatagccttggcggtcttcagtgcagaatggcgtaaagataattttcgccccttgatccgcggcaattctcgcaagctccggaaattcgatatcgtaacagatctgaatggcgatctttccgcagtccgtatcaaatacgcgcaccctgtctccggcgctgatgccccaccatttccgctcattcggcgtaatgtgaagcttatattgtttttcaatcgtgccgtcacgtctgaataagtaggcgatgttataaattttcccctcttcttcaacgaagtgggagccgccgataatgttcacattatatttcaccgcgagatctgtaaagaggctgatatagtcctcggtatattcggtaatcctctgaatggccagactcggagaacgctcttcgagaaatgacataagctgcgtcgtgaaaatctccgggaataccgcgaaatcagatctcgcatctgaagccacatcgacataatattcaacctgattggcaaattcctcgaaagaataaatctttttcatttcatattgaatgacgcagatgcgcaccggaaatgccgatttgtaatagcgctttgactgcggcagataatcgacattgttccattccattaatgtcgcatatttaatggacgcggtgtcatccgggagataattcggattgatccgcatgagcgtaaatccgttcatcagctggaaagaaagcaccgggtcataaatctgatggcgcgtcacctgttcgacataggctctcgccgtcatttcttccgcatacttatgataattcggaatccgcccgccgataatgatgcttttcagattcaatcgtctcgccaagtcttttctcgcctcatacagccggtgtccgattttcatccgcctgtattccgggtgaaccattacctcaatcccgtacagattcaatccgtccgggttgtggttcgtgatataaccgtcgtctgtaatgtcctgccacgtgtggcggtcatcatattcatcgaaattgatgatcaggcttgagcatgaaccgataatttccccttcatactcggcgcaaaactgaccttccggaaagtgcgcgagatggctgattaaatgctcaggctcccacggctccatccccggaaaacaatccttttgcagctcaataattttgttgatatctttctcttccatattccgtatgaccattttcttttcaaaacgggtcagatcaagtttctcagacaatgctgcttccccctgccggttcgttttgatcgttcaatcgctgtaagagtaattcaagttccatttccgccatcgattccagtctgtgatcgtattcttcaaataacagggcgctcgttaccttattcggcacgatgacacatttcatgccggcgcgtttggctgcgattgagccgttgaccgaatcctcaaaggcaagacattcagaaggttcaacgcctaaatgttccgcagctttcagatagagcttcggattgggcttcacttcttctacgtcgtcagccgtctgaatcacttcaaattcatcaaacaggcctaattccttcagatggcccgacacccatttaaaatctgagctggaagcgagccccaccttcaatcctaattcttttgccgcggctaaataagcctccactccgggacgcgccgtttccgtcttcatccgctgttcgaagcgcccgcgcctgatcgccgtcagttcatcatgatcgagctttcttcccagctgctcctctaaatatgcgaacggcttaaaccccgccgccgttccgatcacctttccccagacggataaaggcaatgttgaaccgtgttcctcaaacatttcctgcagcacttcatattcatgggtttctgtatctaaaattaacccgtcaaaatcaaagattaatgcttttatcaatggttacagctcctttagctaaacgtactgacctatgtatacactataccgtgaatttcttttgcattcaaaatgtaacattctcacggaaagaagagcctgcatgagtgcaagctctcttcatccgttactgtgtgttttgactggaaatattggaaagagccgctcccgcagactcatttgaacgctgatcgaccgctaagtctccaagcgcaacgatcccgaccagatgattttgatcgacaatgggaaggcggcggatttggtgttgggccatcagatgtgacgcctcttcaagactcatttccgggtttccggatacaacttgagaagacatcacgtgtgaaacaggtgtttggccgtcgcggccttgagccgttgttctcaatgcgatatcacggtctgtcagcattccttttaattcccctccgtcaacgacgggaattgctccgacattatgctggtgcatcagcgcagccgcttcctggatcgtttggttgggagaaacggtagccacgtgggtagtcattgattgtttgattgaactcattgtaaagcacccctttcgcattttattatgctcggggatttgactcattataaagggagttagaggaaagaaattgtggtatcatgtcaaggaagcaaaaaagagcctgtcaaaaggctctttatacccgtcagatcagccttctgtgaccgcaggcttctgatccggcccctgtctcgaaatcatcataggtaaagggaaaattcattccgcattcattcagcaaagcgcaatttttatcaaacagcgcccgctctttgacgtcatatacggggtgcggctttgacagcatgatatgtaccgtttgcagacaagccataatttgaaacgcttcttttaaagttccttggtaacgttggttttgtaaagacaatacgcccctttttttaaagcgctgaatttccagttcggagaaataaagaggaaagacattttgaaacaattcagaggaaagctcttgtatcgcgctttcttgtccgtcagtcgctgcgttcacaattctcacatcaatcacctttcttgccatgtgaatatccttaatctttatcaagaatagcatagaaaaaaacgcgaaagctaaggtaagtgtttcctattgaaacagccgctttccgcttgaaaaggagctttatgatatgaaacaaaatgaccgcggtctggaactcctgattacggaaaaacacgccggacaatggctgttttcagtcctgaaatctgaattccaggcgtcaaaacccgtgataacggaatggatgaaccaaaaaagcattcaggtgaatcggacatccccgaaaaacaacatcatactgaaaaccggagaccgcttattcattgatcttcaggaaaaaacgggttcttcggtaattcctgaatacggagagccggacattttatttgaggacagtcatatgctgattgcaaataagccggcgggaatgccgactcatccaaatgaagagggtcagaccggaaccctcagcaacctgatcgcttaccattttcaaatcaacggcgaacaagcgaaagtgcgccacgttcaccgtcttgaccgtgacacgtcaggcgcggtcgttttcgcgaaacaccgcctggcccatgcaatccttgaccgtcagctcgaaaccaaaacattaaaacgcacctatatcgccgcggcggaaggaaaagtcacgccgaaaaaaggcacggttgactcgccgatcggccgcgacaggtcacattccgtcagacggcgcgtctcacccggcggacaagccgccgtcacccattacaaagtgaagggctatcatcccggtgcgcagcttacattggcagagcttgaactggaaaccgggagaacacatcaaatcagggtgcatatggcaagcatcggccatccgttggcgggcgatgacctgtacggcggaagcagggcgctgtttcacaggcaggcgcttcacgccaaaaaagtcagtgtcgtccatccgatctcaggagaagaaatcgttgccgaggcgccgatgccggctgatctggctcattttaccgaaacgtatttttcttaaaccgggtcggcatatataatatatcgtttcggcgcatttccaatgtaagaaaacggatagcaagtggtcaggatcagttcctcccgcttgtgttgaagggtgatgacagacgtatcatcccggctgacgatttttgtacggctgattttataagaaaacgtgccgtaagacaaaatcacgttcagtctgtctccttttttcagttcgccggtccggcggaacaccgtgtccctgtggccggataacacaatttggccgtgatcgccaggataatagctgtccttataatgtccgacgccttttgctaaatcatctgcgtcagtcccttcgacgatcgggagctcagcgtcaatttcagggatttctaaaatgccgcttgcctcacccgtttcggggtgaaattcttttttgcgctgtgcctgcacagcgctttttgtttcgttcttttccaagacaggttctgttgctttttttgcttcttcaagcgattggttcgttttcatatgtgaatcaatgatcttccagcttccgtaacatgtgatgataacacctgcgatgatgacgagaagcggaatatgtttcagtttgttcatcgtgtgcgggttccccttttctttctgaaaagccaatatacgccggcacccgtgatcaccaggccggccaatgccgtctgatggctgcccgctgaagtatcaggcaatgggcggcctttttgtgtgccgctttcagtctgttctgtgctttgttccgaatctgcggcagacgccgtacgggattcgggaattgactgcactgtatcagatgctgcttcttttacgacaggacgttcaggttttttggtttgatcaggctgttctgctgcatccggttttttagcgggtttttccgtttgaggtttttctcctttatcaggcccggtgctgcccggtgtttccccgcttcccggctgattgccggtgtcatcaggtgtttcggcggctgatgccgtgcggatgcggccgtcggtttgataagaaatcggtgcggaaaagcttttgacatagtctactgtcgcttccaaatcctcaggccccgtcaccggattcttgccgagtttcccgatcggaccgtattttgcccccgctgccgtcgccataaattgattgactgttactgtatatcctttttcgggctgtatgtctgtaccgtccgccattttcacatccgccgcttgtccggtttccgggttccatgtataggaaaatccgctgatgctgtaatccggtccgtacaccggagaaatttgcgcgttgatgatctcccgcaaatcttttcctttgatttcaagcttcgtcagcacattgccgaacggctgtacattataaagatctccccatgtgatcggccctttttttatgccgtcccggatgcctcccccattcataagcgcaaaatcggatttcatcttcgctttcataccgtcggcaatcagatttccgagcgccgtgtcgccgtcatttgaatacccgcccgttatatcatgggccgcttccccgaccgcttcgctgataatcggtttcactttctcttcatatttgcttaatatgcctgccgcatccggatcaggcttgattttactttgatcgatatattggatttccgctgattttttcacgatatccttcgactctttatctagttcgagatcggcgattccgattgcttttccgtattcaaatgcctgcacgatcagcttgccgttgatttctccgtttacgactttatgattgtgcgcggcgaaaatcacgtcaatctctgagtctgttccgcttgcaagctttgcggattctcccgtgatggctgagccattttgttcagcagacatatgggcgagcacggcgattgctttaattccttttttcttcaggtctgcggcggcgtcattgacggcctttacctcatccgtaaacgtaatatttttaattccgtccgggatgaccatgcctgccgccgatctggttacaaccccgataaatgcgaccggaattccggaaacgtatttgatttcatacggcggcagaaaggactcccctgacttcaatttacagttggcgcagacgagcgggaaatcttggccgtcataaccgcttgtccccttaccgtccggatgatctcctccattgatgatccgtttaagctcattcgttccttcatcgaattcgtgattgccgacagttccgacatcaaaaccgatgtcttccatcaattctactgtcggttcatcctgaaaaagggctgacacgggagagctgcccccgatcatatcgcccgcatgcacgacaaaggcgtgttctttctcggctttcgcctttttaatgtacgcggtggcgtagtccatccgtccgaaagtgccatccggtttaccgtctccgttaaggtcaagctcatattgctgatcaatttttccgtgcagatcattcatgctgatgattctgagcgggatacggccggagtcttcagtctgccgttctttatacgctttatccgttccagcttcattcagtgatccggcttgtccgattgcttccgcatctttcacgctgaacatcataaaacaaaccgtcagcaaacagcacgaaagacgcaaacccctttttttcttcattcatttcccccctgtcttctaagaaatacgttagcttattttcttaaaaatcacatcacttttttgtaaagattgtcttcgctggcgcaaaatagtaaataatccccacgtaacgaaataagtcttgatgtataacggatcggcttttttcacatcttaaatgtgatttgacatgaaggaggaaaacaaccagtggaacagcagcagaatcagcagcagccgccagtaaatcaggggattccgggttcaccgcaagtgaatcacggaggacatgagcttttcgatatgcatgaagtgctggccggaacagtcggcgttttggatcaatttatgatgctcagacagtttatacaggatcagcagctggccgacattcttgaccgccagtatcaattcattctcggactctataatctgacggcagaatgctttaagaccggccaaaagccttctcaggaaacgtcgacatatatgatggaggaacagaaccaggccgtctacggtataaaaccgactcagccgaaaaaaccgaatcaatcattaaatgatgtcaaagatctcggaataagcggccatatgctcggcctgattaaagctcaagcttctctcttgacgatgagctcgcttgaaatgaccaatcccgtcacaagaagagtgctctccgcccaaattcagcaatatgtcgaaatggcgtatgaaatcttcttataccaaaacaaacacggttattatcaggttcctcagctcaatgcacaagatatgcagaccatgctgaattcatttgcgccggcgcagggacagccgcaaatgcctccgattaaaggacaaatgggacagcagcagcaaaacctccattaatgaaaaaaacggcgttggaaagctgactctccaatgccgttttctttttttcatatgcttttgtgaaatcatgttcaaattgtttcaggctttctttcgtagctgcttcaaagcctttttcaaaatcctgtgtttcggcggttttattgataatggttaagataatgccttctccgaatgtttcggttaaatcctttatcatatagaaactttgcaaataaacatccgtttcatattccatacgcgatttctgccattttcggtcggtcgttaattgatcaaacggcacgacggaaaatgcaatcggatcaatgaccacatcataatgcgcaacccactcgctcagcccctcatgaaaccaaagcggaaatacagacgtatccgtccccaattgccgcgctttttgatgaaatgcgtagtgtgtatattcatgtataatcaattgcttatacatgaaaacggccagctcatcttttttcaaaagctgttttttctcttctggcaagagccccatcatctgctcctgctctgaataaaaaccgactacatttttcaatcctgagtattgctccatttcagcttcatccgaaaagaaaatgagttcaagaggcgccgctcctttatagccgacaatgatttggttgatacgctttgcgtggtccagcgtaagcttggtcagatccaagagcggcttttcatccgctgtatagtaaatcgctgtatgtttgtaaatttctttattcatgtgttcagtcacttgttccttcgtcggaacagagcggctgttttggcctgacaggacgtacatcatacttactgaaacggctgaactgacagccaatatgacaaggactccgcacaggatcagagtgaatgccgcccgtttccccatgccgtcacgcaaacaagctcccctccccgatcctttaattttcatctcattctttactttatgctcagaagcgctgggtcgtgacggcagataaaataaaaaagccgcagcaaatgcggcttttccattcatttatttattggggtttgggaatacacgctgcaccatttggccgaattcatcaaacagtccggataccgggtggccgttttggattcgttttccgtagccttgcatacgttcaacgaagtccgggtttgctgatacatatacagtccggacatgtttatcggctgatttcaccttatcggtaatcttatttttcaaatggttggcgatggcgcctttttgtccgtttgtcagaacaacggctacataagcgctgtttccggcaacgatcacagtcgcatttttaacttcttttaaatcagtcaccttgtctgcggctttatcagccactctcaggttacggttgtcattgtgatcggtgttttggttatgacggttcactgtattcatatttgtcgcaccgtcgttaggtgtgttgcggtaatttacattctgggtgcggttgtcatttcgttttccttctccctggttccccatactgcaccctgcggtaatcagcatcggcagaagaagggcagaaataactgcttgtttttttatcatgtgaattcctcctttctcactttacgtataggtttttctattcggcgggatttatgcacgccgtttgcattctgagcggtttggataaatatcagaaggatagggaaaggtaagcgtaatcaattgaatgaggagggatttaacttgttcagacaaaaaagcggcatcagcccgacagcgctgctgatcggatcatcgattctgattgcagctttatcacccgaaatccgccggaaaatctccggaatggtttcaggccgaatgcagcataaagatggtacacactccatgcagcctgctgacctgattcaacaggctttcagcggggaatccggcggacagcagcacacggacaaagcacggcattcacaaacaggctccatgcagcctgccgagctgatcaaacaggctttcggcggggaatccggcggacagcagcacacggacaaagcacggcattcacaaacaggctccgtgcagcctgccgagctgatcaaacaggctttcggcggggaatccggcggacagcagcatgagcagacttcccgcaatcactccggctcatcccatacggacggacaggcagaccgcagtaaagaaacttcgccgaagcctcactataccgagccgattcacttcgaagaaagcgcggtaaatgttttaaatgacagcaccgtgatgaatatgctggaagaaattgaacccggaaatcattagaaacgaaaaaaatccttcattcgttcaacgatgaaggatttttcgttttagcgctatctgcttttttattaagcttcttcagcttcaatgacgattgaggaatcattgtacaccgcggtatcggtttccttcgtcattttacttgttaacagccctgcggtcatactgccgctgacatttaaggcggtacgccccatgtcaattaacggctcaattgaaatgagcagcccggcaagcgcgacaggcatgttcaaagcggataggacgagcagagccgcaaatgtcgcgccgccccccacgcctgctacaccgaatgaactgattgccacgatggcgatgacggagatgataaatcccggttcaaacgggttttgccctactgtcggcgcaatcatcatcgcgagcatcgccgggtaaatgccggcacagccgttttggccgatcgataaaccgaatgaaccggcgaagttcgcaattccttcagggacgcccatgcttttttgcgttttaatattaagcggcaaagcccctgcgcttgaacgggacgtaaacgcaaacaccatgacaggaaatgcttttttcacgtatgtgatcggatttaaaccgctgaacgtaatcagcagcaggtgaacgataaacatgacgataagcgcggcgtatgaagcgatcacaaacatccccagtttcgcaatgctgtcgatgtcgcttgtcgcgatcgtctttgtcataatcgccaataccccgtaaggcgtcaatcttaaaattaacgtcacgacgcgcataataatcgcgtataccgcatcgacaattccgctgaacgtcgcagcgtgctccggctgcttccgtttcacgcccagaaaagcgatgccgaggaaagcggcgaaaataacgactccgatggtggaagtcggtctggctcccgtgaaatcaagaaacggatttcccggcagaagctcaacgatttgctgaggcagcgttttggccgtcatatcctcagatttttgctgcagctcctggcctcttgataactcggtgcttccctggtcgatatggacggctttcagatcaaaagaaagcgccgaaacaattccgactgccgcggcaattgctgtcgtggcgatcaaaattccgatgatcagtccgctgattttcccgatgttatgggtcagtttcagcttcgtaaatgcgccgagaatagaaataaagactagcggcatgacgatcatctgaagcaatttgacataaccgccgccggcgatattaaaccaatcggccgtttgtgtcacgatatgtgatgccggcccgtaaatcaattgcagtgcaaaaccgaatacaatgcctagtccgagcgcggtaaagacacgtttagaaaaggaaacgtgttttttttgcatgacaaacagacctgctataagcaaaagcataataaaaacatgtaagactacaaataaattctccaaaacaggtaaacactcccttgctcattatcctttaacactatattatatcaattccgatcggtcaagtaaggattgacaatatatgtatttttattgatttttctcttttctttccaccctttctctagtaacttatataagggtgattgttatgctgaaggaactgtttcttaatttaacgattttaatcacatttaattatctgttcacccttctttttaaagagtcgctttcgtataaagaagaccgtccgatgtttcaattactgaaggggacggtctgcgggcttttaggggtttttctgattgctttcggcttttcttactccgattccatcattgatctcagaaatatccccattatcatcgccgctctttacggaggctgggtgtctacggcagccgcctttgcgattatcgtcgcaggccgtatcctgatcaatttcaatgcaagcgccattttttccatcgccgccgtcggggttattgcgatactttctgcggccgtcctcagaggaaaaaagccggatcataaaatggcgttcgttatgctgcttttttcaaatgttattttcaccttgacgctgctgtttcttatgcctgaacagcctgccggggccctcgtttattattggctcatttccatcttgggcggaatgctgtcactgtatatcatcaaacacgaagccgatgcccgcgttttgttcaagcaatacaagtttcaagcgaattatgattttctgacggggatttttaataagagaaaattcgaggaagtctcgcgcgttctgtacgatcggacgtctcaatccccctcgtctcagctcgcgcttatttatttggatattgatcactttaagcagatcaatgatcaatacggccattatgaaggggaccaagtgctgaaggaactgggggcgcgcctgaggttcttactcagcagttctcatacgtcagcccgcatcggcggggaagaatttgccgtgcttatgcccaattgcacgtatacaaaagggcttcacctcgcagaggaaatcaggcacacgattgacgcgaacccgattctgctgacgagcggagatacaattcccgtgaccgtttccctcggcatcgcgcattatccgacaaatacaccggaccctcagacattgcccctgatcgcggaccggatgctgtacaaagcgaaaacatcagggcgcaatcaagtgtgcagcactgaaaaaaaagaatgatcgcccgaagaggaaatcattctttcttttcagtgagaaagccgcccctcaggaaaacgggaatcaggctgccctcatattctttttcaatcaacgccgcggtatcatctgattgatacaaagacaggagtttttgcatccgttcatcatctttatcctcagctctgacggcgatcagatgaatatacgcttccttcatttgcgccgatcggatcagcgcgtccttctccgcatgaaatcctgcttttttcgcctcgctttgactgagaactgctgcgtcagcatgttccgccgcctgataggcgttcttttttgtttccgtttttaaggtcagatgcttcgggttgtccttgatcatatccgttgaccccgtaccgctgaatccctttttcaatgtaatcagtccggcctcctgcatgagaaaaagcgccctgccgaaggccgccgcttcatcaggcacggcaatgaccgctccgtccggtatatccttcagccgtttatgttgcttggaatacacccccagcgatgccgcatatgtcgttcctaaaggggccagcttctttttcacgtgaggcggcaaagatttaaaattagtaacggattgaaacgcattggcgtcgagatccccgccggcaagtgccaaatcggcctcagcataatccgaaaacgttaccaaagaaagctgcaatccttcctcaccggcttttttcgcgacaaactcccagatcgattgatcagattcattgattccgatagtaatggtccggttcccgtcaggataatcgcatgaagtaagtgacatgatcaaaatgaaaagaaacagactgtttataagccgcagattcaagttgacctactccctatctatttttatgtacagaagctgcaccatggtattcgggctcatgattacatacaataccgattaaaaaaagggttgtcaattgcttccttaagaggctgcaaagcggtttttatcagctgcaaatgggctgttctggtctcaaatcagatttccgtatcagagcgttttcctcttaaaacatgttatttcgaaaaaagttacatttagcagttgttttttcttcggattactggtagagtaaaggtaattatttttgttcgaactatctttaagaagaaagttttgtaagagttttcgtcttggaagtttgttttagagcaagaatagtgaatttaagcgtttgtcgctttaggaggaaatttcatgttagaaggtaaagtaaaatggttcaactctgaaaaaggattcggattcatcgaagtagaaggtcaagacgatgtattcgttcacttctctgctattcaaggcgaaggcttcaaaactttagaagaaggccaatctgtttctttcgaaatcgttgaaggaaaccgcggaccacaagctgctaacgtaacaaaagcataaattgtttaaaaaaacctgccggtgtacgccggcaggtttttttcatctaaaacgaaaagctgttttgcaaaggcaaaacagcttttttatatcaggtggcaatatcccgttttaagaagacgccgaatgcaagcgccagaaaaataacgaagtaaatcacaagcatcacaaccgaaaatgtcatcgtcatcccctctactaaaggagtcccgttcatatattgcgacaaatccgtgttcgcaaataaaatatatttggtccattcaaatttcgcagcaagaaataccgtcgccgtgttccccataaccaatagaaaaatagaaaatccgaccgctaatgaactgttccggaataccgcagacagcataaacgccatcgtcgcaagcataaaagcggagacagattcatagacatatgttttagcgaggaaagcgatgatattttgctcaaaaacatggccgtctttgtatacgagatgaacatcagccgcagtatctccgcctgtaccgaaaaagaccaatcccaacagagcggagccggcaaataaaatcacaagcatcagcagtccgaacagcagcactgtcatatatttagaaagcaaaatctgaaaacggctgagcggacggatggccagcagcttgatcgtcccccagttgaactcattcgccacgatgcctgcggcaatgataatcgtaaacagcccggtcaaaacagtcatcatcgaagaatcagatacgtatgaccacactgtgtaccctgtatcctcggggatgttatgatccatacggtattgatttatcgcgacattctgtttcaggttatcaatgagcgtctgatttccggtttccttcatctgctgtttcatttctttgttttcagcctggagctcctgtttccaattcggattggcttcgttcgaggtgaaatggtttgacagaagcgcaaaaccgatcatcgaaacgcctaaaatcacaatcatagcccacgtgccgacgcggctgaaaattttaatccattcattatagatcagcttaaacatattgaacctcctctttcgtcccgccggtaatttccaagaaacggtcttccaaagattttgtcatgattttcacttcatataagcggatgttttcacggacgagcagtgatatcacatcaggcacttcctgtttggacagctggatctcaatgccgtttgtcttcttcacacagtcaaactgactcaaaacggcaagagcctcttctctttgttcaatatggaagaagtatgtatctttatcctcttttccttcatcccttactttttgaatatcgacaagctctcctttttgcagaatgccgattcgatcgcacattagctccatttctgacagaagatggcttgagacgatgacagccattcctttttcacgtgtcagctttttcagatggtccctgatttctctgatgccggcgggatcgaggccgtttgtcggctcatccagaatcagcaccttaggattatgcagcaggctttgggcgaggccgagacgctgtctcattccgagagagtaggtttttactttgtcatgtattctgtcctgcaacccgacgagctcgatgacctcatctattttttctttcgtaacgccttttaccatccttgcgtactgctgtaaatttttatagccgctcaggaatttgtacagctccgggttttccacgatggctccgacgtgcctgaccgcttttgcatagtttttcgtaatggattccccgcagattacgatgtctcccttagacagtttcattaatccgaccatcattctgatcgtagtggttttccccgctccgttcggccctaaaaatccaaacacttcgcccgcccggacggagaagctcagatcatgaataatcgttcgtccttttatcgttttctttacctgttgcagttctaataccgtttccaattagaatcccccttctatttcgtgcgcctgcatgacgtttctataccattgcagcacggacattccttcctgttcccgaatttcttcgacctcgcgccgttcagcgattttcccttttatgaaaaccatcacttcgtctaacagcgtctcaatctcgccgatctcatgcgtggcgatgacgacgatctgactgtcaaaatcaatataagatacgagactgttgacaatcgactccctgaccgccggatcaagacctgaaaacggctcatccagcagaatgaccgatgcttttctcgacagggccaaaacgattttcagcctgccccggctgcctttggacagctcttttaacttctgcttcgctgaaagattcatttccgctaataggttatgtgctttttccagctgaaaatccgggaattgcgaatgataaaacgtgagcatatcaccgacggtcgtccgggcggaaaacatatcatgttcggttaaataagccgtacgaaacagcatgttcctgcttactttgcactctcccatccggacggcgcccgatgtcggaaaagcaagccctgcaagcattttaagcgttgttgatttaccgcttccgttcggccctaaaattccgtagattttacccggagacaatgaaaatgatacatcgctgaccgcgatcctgcggccgtatttttttgttacgcgttcaaaatcaagattcatcgtttgcttcctccgcatattgtttgatcccctcgagcatttcctcaggagataaccccagctccgccatttcctgaataaagcgtttgaaaacgtcttttgtcagcctgtctttcagctctgctttcagatcggatctttccgctataaaggttccctgtcctcttctcgtctccacgatccccagcctttccatttcactgtacgttctttgtatcgtgttcggattcactttcatctgtacggccatctcccttacggacggcagtttgtcccccggtgaaagctcacttcggatcagccggtaatatatacgatcggcaatctgcagataaatgggcttggatgactgaaattcattctccatcattacacctcaacctttcgattcagcagtatagaggccagcgcgagacagagcgctgcaagcacgatcactgccagaaagctgaaaagcgaaatgtggacggctttcagctccatcgtccatccggacaatttcgtataatgaaaatgaaaattcgcatacacttttaccggccataaatcatgttgagatgaagtgaaaggcgtaatgattttatcgtcaatataggtccagacaaacgcaagcacgatgcagatcccccaacggaggacgggaaaatgttttaatgagtgaaaaacagtccaaaatacggccacgatcacagataagtacgctgaactgatcagcaggtaagcattcagcccggttaatgtgccggccaggggaatggtgtgttccagcactccttttgcagaaagcatccggtacatccaaatgccgtaacccgtcagcgccagctgcccgatcaactgatacagcagtgaggccgtcagcttggaagccagcagataaaatcccccattcggattgtaaagccacagctggttttttccttctttatgaaggtgataatacataaaaagcggcgctacaagaaattgaaaaaaccccattgccgtaaaaaagccgaaaatgacgagcggttctttctgacgggcagcgatgacgtgggctgaaaacgcccagcaaatcatgccgcaaagccacaccgcgagccaaatccatgaaactttcgcatcttttttcagcaaacctaaaaacgatgtcattctttctctctccattcggatcaagtgtatgagtaacatagtacactagatcatcacgtattacaatatcttcaataaaaaaaagacaaatccgctcttacgcggatttgccttttcaattacttctttttgttttttaaggagagcagcgcatcacgatagctgctatcctgcattttgccgccgctatcaggatcgtttggttcctgatccgtctcagaagtcttaaacttctgaagcgcctgacggtacacatcatcgcccattgtattctttttctcacggggagattcagattttacaacgacgggagcatgctcggctgagcgctcctcggccggatcatgcttttccggctgttcggctgtagtgccgatcgcttctctcttttcttctttgacatcctgtcctgcagaagtgctgcggacattgaaggtgataagaagtgcaatcacaatgacagcagcaataaccgctataataatggccatataaccctctccttactgtcgtccggcagttagattaccagtgacctggctgacacgtctgccaagcgcacggcctaattgaaggccttcttccgtcatcagcacatcgctgtcaaccgggcatgtgacgcccgcgccgtagtaagagccgtacagcgcgttttcaggaacgttgccgggaagaccgacaacaatcatgccttggtgaaacataggagtgatcagattgtgcatggtcatttctaatccgccgtgtgttgtcgccgtcgtacagaatacagcgccgactttatcaatcagctcgccttcagcccacagatagccgagtctgtcgatccacgcttttaagcctgaactgatggtgccaaagtgtcccgggcatccccagataatggcatccatgtctttcagcttgcggatgtctgcttgatcgacatggtcgatcaggacttcagcctcagcgttttctcgtgcgccctcggcaatggcttcagcaagatgttttgtgtgttcgccttcactatcgtacactacgtaaattttcattcaggaaacctcccattcagatgattaagattccttcacttctttaggggccggaagcaatgacagctcctcttttttcttcgcccgctgtttgtctttccgcacgtcacgcaagaacagactcaggactacgccgataaccgcaaagatcgtcgcccacataaacgcgtcattaatccccataacgttggaattgagtgaagctgttttgtagagatatgaataaacggtttgtttcgccgcatcaagcgacatgttcatgttgaccattaaattcgaaaccgcgctttggaacgactgcatgaagcttggatcagccgtgcttgttttatccgcaatctgcgaataatgcattgtcgtacggttcgtataaatcgttgtgatcaaacttgttccgattgatccgctgatctggcggagcgtgttgctcatcgccgtgccgtggctgttcaaccgtgccggaagctggttcattccggctgtcataacaggcatcattaacagtgacataccgaatgcgcggatggcatagacaagcatgatgtgcgtgtaaggtgtgtcaattgtcaattttgtgtactggaatgtcgttgcgaccgtgatgaccagcccgataatcgcaagcggtctcggaccaattttgtcaaacagaataccggaaatcggcgacatgatcagcatgacaatcgcgcccggcaatagcaagagacccgattgcagcgccgtaaagccgactaagttctgcaggtaaatcggaagcaggaacattcctgtgtaaagcgcaacggtaataatgatattaatgacactggaaagtgagaaaatatcatatttaaatacccggaagtcaagcatcggtttttcagagcgcaattgctgaatgacaaacgcggcaatcgcgatgacaccgacaatgacggtagacagcacgatcggatctccccagccgtcgctgcccgcttcactgactccgtaaagcaatgaggcgaatccgacaatagatagaatcgcacccaagctgtcgagtttgattttttgcggttccaccaagttcttaaagaggaaaaacgctatgataataacgattgccccgatcggaacaaggccgtagaacataatgcgccatgtgtaatgctcgatgatccagccggatagagtcggtccgaccgccggagcaaacatcatcgcaagaccgaaaatccccattcctttccccctgctttcaggcgggaagataagcagaatggttgtcatgaccagcggctgcaggataccgccgccgaccgcctgaattaaccggccgatcagcatggttgagaagttaggcgcgattccgcagactaacgttcccgctgtaaaacagaacatggctacgagaaagaggcttctctgtccgaaccgggtgattaagaacgcagataacggaatcaaaacaccgttgaccagcatgtatccggtcgtaagccactgaatcgtcgtcgcactcacaccgaactcggtcattaagtgcggcatcgccacgttaagaagcgtttggttcaagatcgccaggaataacccggccataagcacaataagcaatgttttaggactttttacttgattatctgatttagccacctaagacaacctcccttcatggtttgatgactgatctgtattattcagagatttttacagatgcgttcataccaggaagcaccttgtcagatgggttgctgagtgaaattttaacaggaactttttgcgttactttagtgtagttgccgcttgagtttgaagaaggcagcatatcaaatgttgaatttgtcgcataaccgatttcttctactgttccgtcaaatgttgtattaggatcgccgtcaacaattacgtctactttgtttcctacttcaatgtctctaatgtctgtttctttaatgtttgcagtgatgtaaaggtgtttcatgtcaatttcctgggcaattgtcgtaccggcttgcaccatttggccgtttttcacttcgtttttcacgattgttccatccatgatggcttttacgtcagcattttgctgtcctttaatttttgcaaccacgtcgtttttgcttacttctttcccctcatcaaggttccagtcagttactttacccgcagcaggagctgtgatagcagccatgtcgccggcaactttcgcttcatcggtttttacatagtgtgtgctttgataatagtagtaagcacctccgcctataattgcaagaacaacaatcaaaccgataatgttggtcagaattaaacgtcctctgttcattttgttttctcctttcgtttcttcctctatcattttgtggaatgatgataaaaatatgtggggatttttttattttccgtttttcactgcacagccgtttgcaagcttcgttaaactttccgcaagcttgcgcaggtactgcagttcagcggtattgagctgccggtataagaccgccgctttttcggcatattgaacagcagctttctttagaagttcttccccctcttcggttaactgaatcataacaacacgccggtcgtcgtgatagtcgctccgaaccattaggcggcgcttatacagaatatcggtcattctcgtgacagacgccggtttcagatcaagcgacaaagccagccttgaaagctgcgtgcttttgctcttatgtattttgaacatcagcagatactgcagcactgtaatatcaaaaggttcaagcactgtctccagaatcattttctgctttttgtaaatcgatctggaagtatcaaacagttgttcaaaactgagcaaagcgagctctgattcaatcaccgtattttcacctcattcccttaataatagttcacaagataaaatattaataaatgaaagaaggtttgtaaagagaaaagtttcattttttaaggattttttttatgccgttttttctctttatttttaatttaaaaaagccgggtgaagaaccgcggccgcacgattcttcactcggctttatatttaatacgatgctttgcttataccggcttcctcatttttaaaaaagcttttcagcgcttgaaatacgtccgatttctgtttcaggatgtagtatttaaatttatcatctttgacatttttataggcggacatgagggtggaatgcctgttatattgattgacctcaccgtaacagaacagattcgattttttcatgatgtcattgacgagctttacgcaccgggcgttatccgaagtcaggttatctccgtctgaaaaatgaaacggatagatgttgtagcgggcggggtcatatttttcatcaattaattcaagagacttccggtaaacggaggaacagatggtgcctccgctctcgcctttcgagaaaaaatcttcttccgacacaaccttcgcttccgtatggtgggcgataaattcgatatcaaccgtttcatactttgtccgtaaaaatcgtgtcatccaaaaaaagaaactcctcgccatatacttttcccatacgcccatcgaaccgcttgtatccatcatggctaaaacgacagctttcgattccggcttcgtcacatcattccatgttttgtatttcagatcttccggataaatagggtaaaacgacggcttgcctgtcatggcgtttcgtttataggccgacagcatcgtccttttcttatcgatattccctgtcagcccggttttccggatatcattgaactcgatatcggtatggacgatattgtccctttccttttgctgcagattcggcagttctaattcctgaaacagcgcttcttccagatccatcaatgaaacttccgcttcataataatcctcgcctgcctgatcgcctgctccctggccttttccggcgccctgctttttatctgcgccgtctcttgcgacgacatcgccgacttcgctgtcgccgtcgccttggccgacatgtttatttttatcatagttataacggattttatattcatcaagcgaacgaatcgggattttcacaacatcttttccgttggacataataatgctttcctcagtgacaaggtccggaaggttgttttttatcgcttcctgcactttcttttggtggcgctgctggtcgtcaaagcctttgcgatggagggaccagtcttcctctgaaatcaaaaaatttccgctgtcattacgggacatgaattcccctccttaaccgttatggtcgttttacatgtgtattccggcttggtcctgtttatgaaacaagtccggcgaaaagatttatttttatcttatgccggccggactctccaattgacaaacaattgcgaaaaacagacaaaagaacccgtccttttacagacgggcctctcaatgaaatcaaatatcagcggtttaacaagcttccgacatacttcagcagttcattagcgctagtcgaattatagccgtgttcatctattaaccttgccactacctcattgacctttttaagctgctgttcatccggcgttttggtggaggtcgtaattttcactacatcttttaagtctgcgaacagctttttctgaatcgcttcgcggagtctttcgtgcgaattatagtcaaagcgttttccttttcttgcataggcggatatgcggattaagatttcttcgcggaacgcttttttggcgttttctgaaatgccgatctgctcttcaatggatctcatcagtttttcgtcaggattcatttcttcacccgtcagcggatcgcgaagcttatttttattgcagtacgcttccacattatctaaataattgtccatgagagttttcgcggattcttcatatgaataaacgaacgccttctgcacttcctttttggcgatgtcatcgtactctttcctggcggcggaaataaaattcatataccgctctttgtcctcggcggagatggacggatgctggtcgagtccttcttttaaggaacgcagcacgtcaagcgaattgatggattccatattttttctgataatcgttgaggaaatgcggttgatgacatagcgcgggtcgataccgctcattccttcatcatggaattccttcttcatatcctccagatcaacggaattgtaaccttcaacgctttctccgtcatagagcctcatttttttgacgagatcaatatcagagcggttcggttccttcagccgggtcaaaatagaaaacatcgcggccacttttaatgtatggggggcgatgtgtacgtcagaaacatcactttcagaaatcattttttcataaatccgttcttcctctgacacctttaaattataaggaacaggcatcacgatgatcctggagtgaagggcttcgtttttcttattggcaataaacgagcggtactccgtttcgttcgtatgcgcaacaaccaattcgtcggctgagatgagcgcaaaccgtccggctttgaaattcccttcctgcgtgagtgacagaaggtgccacagaaatttttcatcgcatttcagcatttcctgaaattccatcattccgcggttcgctttatttaattcaccgtcaaaccgataagcgcgcggatctgattccgaaccgtattcggcaatcgtagaaaaatcaatgctccccgtcaaatcggcgatatcctgtgatttcgggtcagacgggctgaaggttccgattccggtacgtttatcctccgagaagaatatacgttcaactttaacatcctcaattctgccgccgtattcttcttcaagccgcatgacattaagcggagaaaggctgccctcaattctgatgccgtattctctgtagaagtcgtcgcgcagatgatggggaatgagatggagaggatcttcatgcatcgggcagcctttaatggcgtaaacagcgccgttatctgtcaatgagtaggcttcaagcccttttttcagcatggtgacaagagttgactttccgccgctgacaggtcccatcaatagtaaaatccgttttcttacatcgagccgcttggcagccgggtgaaagtattcctccacgagccgttccagagattcctcaaggccgaacagctccctcgagaaaaagctgtatgtctttttcccgtcatcctcctcgattccgctgtcttttatcatattaaaaacgcgagaatgagcagactgcgcgaccaatggattttcttttatgatctccaaataatcagcgaacgtcccttcccatttgagacgctgctcttcctctctgtacttttcaattttctttaatatatccataagaacctcctctatcatggttaatgcactagaaataaggtactttgttacaatctatgcggtgacgtgataatacatgcttttcgtttcttaaaaataaagacgttataaggccgtcattgacaagggtccggtgcaccgttcataatgaaagaaatacagtttcatccagactcggacatcaaatggaaaagcaaagaggaggagacatgatgaaaacgatcattttacttggggtcattctcacttttttagtatccatttttactgcgggttacgacagcaaacctgaaaacaaataacggcaaaagggtgctctttatgaagagcaccctttcctgtacaacataacaatgtttcatatttgaatatgttcttggacagttgatttttcatgagacttacagcttgtttgatactcgatttttccgattttgcagcccgggccgatttccacacgcttccctctgacgatgtccgcttccgtggattcgaggtaaattgcgtctccttcgatcaattcagcagaaagcatgccggctttccgtttaagaaaaccgggtttccgtctgacggtaatcgatgtgccgccgatttctttcacgcggcttcggtcataacgcaaatggatgtttacgtcccctgcgtttaacaatcccgccacattgatacatcctgttacatgaagcagctccgtctcgcaatcgccgccgacggtgagactgccttttatatgacactgttctcccgcggccccgccgccaatttcagcaagtcccttcagcctcatcctggcaaaacgcatggagccgccgactttcaatgtgccgatcacatttgctgaatgtgctgataaatctcctgcaacttcatgctctccgaaaattttcagcctgctgatctcggcatctccgagaaaaagtcccgtgccgaatatccggcagcgttcgctttgaagtccttcgccgacagttccttcccctttaatgcttacattttggtaggaaccgccggaagcgtgtccggctccgtacatttttaaatgactcaatttttttgtcgtttccattgcagctcctcctatcgtttcacgactttgttaaccaaagcggtaggatcacatgtaaaatcgccgctgtattccaccgtcccaatggtgcagcccgcgccgatccgcacatgatttccgcggactgtcttcgcgttcgtgtccgccaattcaatgatgtcaccctcaatcagctctgctgtcagcaccggggccggcatcagcttaaaacgcgtaagcacgctctttctgctcatcactttcaaatggcggcagccgatttctttcacatgactttctcccgcagccagcttcatactgacttcatcggcattcagcaggccgccgatcttgcatttgccttccgaacggaatgtctctgtctcgcaatcaccttcaatcccggctttcccggatatgaaaatatcatcagctttcacaccgccgccgaaagatgaaaatcccgcgacgttcagccgctccgttttgacatcacctttaatgacacccgttccgttgatacggatggattcagcttcggcactgccggaaattttccccgaaccgctgattgtcagtgtttgcgtcttgacatgtccgtctgtttttccgctgccgttaaacaaaaggctcgtgcactccacatcacctgacaccgtgccgctcccgttgatctccactgtatgaaaacggcctccttttgaacttcccgaaccgttaatgattaatttatctgttacttccattgatggtcctcctgcatccatttcgtttttaattcttccgatgccgcagcaagcgccacccgttcaaccactttgacagtcggttcaaataaaatatgttccgcgtctgcgatgaagcacgtcgttacgccgagctttcggagcatgacaagctccgtattcgctttcagctcggaagcctcatacgtcttcagcacccccgccgccaattttccttcctcaaggctgatattgcccgattgcaaaagcccttcaagcacatataaagacagcagcgcgcgggacgtgaatgtcacgccgtcttcgccataaacttgcagcgcggcttttgaaatcagtcccttttgaagcagttccgcagacgttatattgacatcagtcatttgcggagacagcatttctctcatttcatccagagacagattttctttcatttcctgtatttttgagatgcgttttaatatttccgctctcggaaaaaatgtttcctggcctgtaaacgtcgattttcggataaaccattcttcaggaattaaatttttccgtttccaccggtacagctgcccgtatgaaattgatgtttcttccagcaattcttttttagaaatcagttgttcctccatgaatccagctccttcgatgaacgtattgtaacataacactgttacgttgttaagcccggaaatataaaaatgccgtaaaccgctgctgcccgtcttttttattcaataaaaaaacgcccggatgcgggcgttttttctcacgtcaaatctctgtaattttgctggcgcagcgcttcatatacaagaatcgcggccgtgttggacagatttaatgatctcacatgctcggtcatcggcagacgcaggcagcggtccatattgttttcgatcaattctttcggaagtccgctcgtttctctgccgaatacgaagaaaaagtcttcctccgtatttgagtaatcaaatgatgtgtgcggcttttgaccgaattttgtaatgaagaaaaactttccgttttcatatgcttcaaataactcttccaatgaatcatgatatacgacgttgacgaactcccaataatcgagtccggcgcgcttcagcattttatcatcggttgagaatccgagcgggcggatcaaatgaagcgttgtgtctgttgccgcacaagtacgtgcgatatttcccgtattggccgggatttcgggttgatataaaacgacatgtaatgccacgatgttcacctctgttttttattccgcccaccattatatcattaattactcttttgtcgtatcatccgtaatatgaaaaaacgcatatctgatggaaggagtatacgccgttgaatcctcatatgaccaatatctcatcctgctgtcatacgtttgggcattgacgagcggcatattgcttttatcttttgcgaccacgatcgccgtatgattaaaacggccgtctccttcaaaatcatagcaaatgatatctccgggcatcagttcttcagctcttgatacttgcactgcgcgaagccctgccttggattgggccagatacatcttcatcgaatgcgcgaccgtccagctgtagctccacgagcttgccttcatccaccagcctgagcctctgttcggatgcccccgcatcggtgcttttccggcatgtaaacattgggaaataaaattggtgcaattatcgctgaaatttttataagcgggatttcgtttattccaaaacttctccgcgtactgcacggcagccagacggtcgtattgaaacgcccgcccgaaatcttcccgttcactccgctcatattcaattacgctgtttccgtcagaaaatccagccggttttttctttacttcccggtctttaatcaaaagctcatcatagagaaatgcagtccgttcctcaatctgctcttctaagtaaaggtgtccgtcatgctccttgcacaaatattcgaaatgaatcgtgtacatgacacataacgtgccgtcgtcctcaagactgcttttgacaatgacggcttttgccttcgctttcacgatatcaactttccgtttttcaaacagctctttttttctcgtcaggacctcaagatcgccggcctgcccattctgcctcatctcagttccgttgattaaataatgaagccgggcctccgctaaatcttcaataatatgcttcaagcgctccacccaccatacgattttataaagaaaaaacacttgaactccggccaagtgctttttctctatacatatgtcaggaccggccggttttagtcttctcagaaaccgataacagctccagtcccttttcaatttcccgtatggcgtcttcatcctgctccttttgaagcgctttttctaattcctccgcataatcaggatcaccgattttcccgatggcccaggcggccgtacccctgatgacggggcgcggatcttggtgcatcaaggccgttaattccggaagagacgaggcatctttaaaatgagccaaagctaaaatcgcattccgctgtatcggcttcttgccgcgccatgatcccgatacatgtccgaatttttctttgaattcgcggttgcttatggtcaaaagcggctttaacagcggctttgcgatttccggatcaggctccatctgcggatgaagatgaaaatctttccccttattaatcggacagaccgtctggcacgtgtcacagccatacagacggtttccgattttcgtgcggaactcatccggcaaaaatccctttgtctgggtcaggaacgaaatacagcgctgggcgttaagctgtccgggattgacgagggcgccggtcggacacgcgtctagacattttgtgcacgtaccgcacatatcttcaatcggcacatccggttcaaagggcagattggtgatcatttcagccagatagacgtaagaaccgtattcaggcgtggtgatcatgcagtttttggcgctgaagccgattcccgcccgttcagccacggccctgtcggacaattctcctgtatccaccattgactttgtgcggatatcctcatgtttgctttggagaaaattctccagcagatcaagcttttcccgcagcacatcatgataatccttcccccaggaagctctgcaaaaaatgccgcgccgcccgtccctcgtgctcctcggcgcatctttcattttggaaggataagcaagggcgatggcgacgattgatttggctttcgggagaagcaaagacggagtaacccgtttttcaatatccggctcttcaaaaccggataaatagccgagtgattcctgaagaatcagccggtcccgcagactgtcgaacgtatcagccgttgtaaacccgattttgtcaactccgatgcttttggcgtattcgattaattcctctttcagtttatgaatattcattttttgcacagcctcctttctttgtgatcaggctcccgcacgggtataatagagttttatcatcccgaaatggagtgaacacacttgaacatcagtttagatccacttattgctgaacgggtgccggggatcaaagcggcagccgtcttatatgaacagatcgaagtcgggcctgctccgcaaatgctgaaaggccgcctccgtttatttcaagaatctctttactttgattatgctgacggcggtatagatgagcagccttttgttaaagagtgggcgtgtataatggaacagctcagtcccgccttttcaggacaaaaaacgccgatggagcttatgctcggcgatatttcccgggaacgattcattgaaagtgtgaattcagcccatgataccatactttttttctccttgaaatattcattgcctatcatggcgtatgacgccgcagaaatagatgaaccgatttcgattacaatcggagaaaaagaacacgtacttgctttctccgactctggcggcattttcggcggccttaccggacatatcaacacccgccctgtaacaatcggcacaaagaaaatgctgcagctgatctttttcccgccttcatttcatgccgacgcggcggatgagctgctatcatctttaaccaaaatgtttgaacaaattcacggaggcacgcataccgtctcttggctttcataaaaagacacgccttcgtgtcttttttcacataaaaaaacgcaatacttcgtttatcagagaaacgaaacactgcgttaataacgtatgtatggagcgggtgatgagaatcgaactcacgacatcagcttggaaggctgaggttttaccactaaactacacccgcatcaaagttttttgtcagtaccgatttgatgtttctaatattacatgtatatttttttttcgtcaagggaatgttaaaaaatttgtcgaaaaaaattcttttttcgtccacatgttaagttaggtttacattttgttaagaatctcatacaatataaaaaagaagaaaacttgaggtacgccctgatgatgaaaaataaagtaaaagagctgagagccagattcggctattctcaggaaacgctcggaaaagaagccggagccaccagacagacgattgcagcgattgaaaaaggagattatgtgccttcactcttattggcgcttaacatctgccgggctttctccctgccgatggaggaagttttctggctggaggaggagaaaaaatgagtttgaaaagaaaagcgtgttttcaccttgcactctacggattggcctgctggacgcttatttcctttatggaagcggcgccgcggatcgctcagtttttccaaacggaggggagcggtgcatttgagctgaatatcactccgtttctgctgtttaccgtttgtgccgcattgtatatctatgccgaaaagaaaaaacgaaacggcaaaaagcataggctagtgcccgatgaatttgaggaacaggatgaaagagaacgaatgatgacggctaaagcttgccgttcctcgtatatcgccgtttacttctcattgccggccgcagccgttctgcttttgttttatccgctgattcagccgcatctacctttttttccgattcttttgattttcattctgatgatgattcagcatttggcttatgttttcacttttcataagcacggcaaaaactccggttcatgacagatccggagttttttatgttaccagctcgcttttttcaccccgggaacccggcctttatgggccagctccctgaatgcgattctggacagtttaaattttctcatatatccgcggggccgccccgtcaccgtacagcggttatgaagcctggccggagcagaatcacgcggcagtttgctcagcgcttcccagtcgccttttgcctttaattctcttcggatgtccgcatattgttcaacaagcttctgccgcttgagctctttgattacttttgatttttttgccatttcagcactcctaacaaatcgtaataattacgttttgtatcatatcatccagatgagcatcgtgcaagctaagcgcttaaaaaggcgggtgaatacccgccttcactgccggcatttccccggaaatgaatccgcagaaagcgcccgccgtcaatgatccgccttgcgacgtcatcagactgtcgctttatttcctcttgcaaaatggtcgtttcccattgcttcacccactctgcgctcaagcttgttagtccgttcattctgaaacggcagaagcggaaacacgagttcagccagataataagcttcttccagatgcggatagcctgaaaagataaacgactcaatgccgagtgcctgatactctaaaattcgatcagcgacagtctgcggatcaccgacaagcgccgtgcccgctccgcctctgaccagtccgatgccggcccagagattcgggctgatctcaagcttcgagcggtcaccgttatgaagatcggccatccgtttttgtcccgatgaatcagcgcgccggagcgcagcctgcgctttcgcaattgtctcttcgtctaagtggctgattaatcgttcagccgcttcccatgcctcttcctcagtctcccggacaatcacgtgaagtctgatgccaaaacgcatcgtccttccttccttggcagcctgttttttaacggtttcaatcttttcttttacctgctccggcggctctccccatgttaaatagacatctgtatgtttcgcagcagcctcaattcccgcctgtgatgaaccgccgaaatataatggcggatgcggagactgttttggcgggaacaggaggttgctgttttccaccttgatatggtccccttcatatgtcaccgtttcgccccgcatgagtccgcgccagacggttaaaaattcttcagtcgccttataacgttcatcgtggctgataaacatgccgtctcccgccagttcataaggatctccgcccgctacgacatttacgagcaaacggccgtctgacagccggtccattgtcgacgccattctcgcggcgacagacggctgcatcagtcccggccggaccgccactaaaaatttcaagtcactcgtttcccccgctaaagcggcagccgtcagccacgggtcttcgcatgatctccccgtcggcagcagaacccccgtatacccgagtctgtccgccgcctgtgccacttgcttaaaataaagatgatccgccgttctccctcccgtttgcgtccctaaataccggccgtcaccatgcgtcggaataaaccaaagaatctccatatgaatctctccttttttaataggttacccttcataactgttccgccattttaatagtttccgttcgagcattctgaccaatgcatctgtcagcttgccgacagccgcaaaaatgataatgccgacaaacaccttatttgtctgtgaaaattgtctggcatccataatcatataaccgacgccctcgctcgatcccatcagttccgccaccacgagaccgagccacgcaatgcctagggagagcctgatgccgagcaggatattcgggagagatgccggaagaattaatttcgtcatctgctgataccaattaaattccagcacccgcgcgacgtcaaacagcttcgcgtccacactgcggattccgagaaacgtattaatgtatacgggaaaaaaagcccccaatgcgatcagcagaattttagatgtctcatcaaatccgaaccacaaaatgaacagaggagtcacggccaagtgcggaaccgtcctgagcatttgcagagacggatcaaggtatgcttccgtccgctttgaaaaaccgaccagcagcccggaaacaagtccgaggcccgcgccaagcagaaatccggcagccgcccggtataaactgatctctaaatgaccccaaagctcacctgaaagaagaagttcctgaaacgtctgcaagatgacgacaggcgacgagagcaccgcggccgagacgatgcccagacttgcgataaactgccatactgcgatgaccgcagccgggagtacaatccctttcatccattggtatgaatacttccgggatcttgccagagctttcttttctgattggcttattgcgccggcagccgttgatgcttctgctttcattacttgccatcccccgtttcaagcgcttttttaataaatgaattgtcgacaacgtcttttacatgaattttcttatgaatcgcttttgttcgatattgaaaatcagcggtttcctgctgggctttgacaatatcatcatcgatcggttcattgagaggctcagtattgttaagcacgtttctgacgactttcggatcaagatgtttgattttcgcatataaggagacggcttcatctttgtgttccttttgccatgtaactgctttattgaacactttcagaaaacggacaacctcatccgggtgttctttggaaaatcccgttctgactaatgtgaaaccgggagaatataaatctgtgctttctccgttcgccaatatttccgccccgtgctgcagcgtttcaatcgacaaatacggctcccaaatggaccatgcgtcaactgatttgttttcaaaagcggaaaccgcctcatcgggctgaagctggatgatggtgacgtcatcggcggaaagccccgctttatctaaagctttatagagaaaatcaaagccgctgctgcctttggctacggcgatttttttacctttcaattctttcaggctctgaatcccgctgcccttgtttacgagaatgccgtttgcctttaacccgtcctgagacagcccgatctctttaaaatcaattcccgccgcctgaccggaaatgaccggtgaattgccgacctgggaaaaatcaagcttatcggcggcaagaccttcaaattgcggaggaccgctttggaattcgacccattttacttttattccgtcttttttgaaggcctcttcaaaccagcctttttccttggcaatgagaagcgggcttaaactctgctggatgccgatccggatttctttcaccgttttcccgccccctcctgtcccgtctgcactgcatccggctgacatcatgactgctgcggctaaaagaatgatgatttttttcacttcgcttcgtcccttctatattccggacccatccgcaaaccggaggtcttccgttttctcaaattcagaaagcaccttctgccggacggcctgaaaatccgctgacgtccgattgcgcggatgcggaagctgaatcggcatcaggctgtgcagccggccgggctttgccctgaggatcgccagcttatcgcctaaatagacggattcatcaatatcatgcgtgacaagaatcatcgtcgtttttttctcgcgccatatatcaagcagcacatcctgcaaatgttttctcgtaaaagcgtcaagcgccccgaacggttcatctaaaagcagcacctccggctcacgcaaaagggctctggcgatggcaacccgctgcgacatgccgccggataattcgcgcggataagcgttctccgctccctgcagcctgacaacctcaatcagatcatccacttttttccgaacggccgggtcgttcatattgagatcggcagcgatgttttgttttaccgtcagccagggaaacagccggtgctcctgaaagataaatccctgccggatgcccggtcccgacacattgcggccgtttattgcgacagagcctttataatcggtatcaagaccggcaatcaattttaaaagcgtgcttttgccgcatccgctcggtccgatgacagtcaaaaattctcccgatgcaattgacagctcaatatcattcagcaccggcgttttccggccttcatgctcaaaagctttttcttgtatgctgatggttacagccatctgtcttcccctctctttctgccgcatgcgatcgaaaaacaaaaaggcccccatctccgattgcttgcagagatgggagccttcggcggtccgatcggcaacccgtttgtttttaaatttgaatatcatgttaattcaaattattccgacttgtcaactgttttttgtatgaattaaaaatgcgccttccggcataaacctgccaaagagcgcatcggctgtatcacgtatttacttccttttctttccgggcgattttcaataatgtctgcgcgttgttgccgaaaatgttttctatatcttcttcccgcatattgatttcccggcaggtcctcacctgctcctgaagatatctgtatacatatcctctcggaaatccgttcgaatccgtcccgaagatgatccgttcagcaccgattaattcagatgtctttcgaaacagaatttccaaatcaagccggtacggcatccacctcatccactgatttgagccggacgtgtcaatatacacattcgggcagctccagcacagctgcagcagttcctgataatatccggcgccgaaatgcggaatgatgaacggtatatcagcatactctctcgcgacgcgatagatggagagcgggttgatgttgcgatggctgacaatgccccccgctctccctaaaagtccgaagtgaattaatacaggcagtcttttgtcagccagatacgtccacagctttttcagcgacggatcatgaaactcgatgtctgtcagcggcccgaacagtttatatcctttcagaccgagctcttcaaccgctcttttcagctcctcatacgcatccttttgttccaaaggatgatatgcaaatccggtaaacctcgcgggattggcttgaataaacgccgccatccggtcattgctctctgctgttaaaaaattcagcacgtcaatgccgtacttatctaattctttctcccatcttgtcatcaaagcgatttcgccgtcatcgccatcaacatcatgcggatcaggaaaatcccaagtgagattcattctttccgaccgctcccggttataatcggaaaatgtcttatcgtttttgccgaaattaaggctgtacggcagatgaccgtgaatatcgacaggtttaaaatgctgccggaaaagcatacaatcgccgcctcccttaccgcctgacaataaaaaaaggcccttatccagtgaagaataagagcctcttgtgtccaagtcagcggtttctattttttctcatattaaacccattattcccgtcagtcaagtgtgttattaaacccataccttcttttcgataataaaaataattattttataatcattataaaataatattgactttttactgataggtgatattatgttcttataaatttaaagaggtgatcacatgagttcaaataaactgacaaccagctggggcgctcctgtcggagataaccaaaactcaatgacggccggcgatcgcggtcctgctttaatacaagacgtccatctgcttgagaaattggcgcactttaacagagaacgcgttccggagcgtgtcgttcacgcaaaaggcgcgggcgcacacggttattttgaagtcacaaatgacgttacaaaatatacgaaagccgcatttctgtcagaagtcggtaaacgcacgccgcttttcatccgtttctcaaccgttgcgggcgaactgggctctagtgacacagtgcgcgacccgcgcggatttgccgttaaattttatacagaagaaggaaactacgatatcgtcggaaacaatacacccgtgttcttcatccgcgatgccatcaagttccctgactttatccatacacaaaaaagagatccgagaacacatctgaaaaatccgacggccgtttgggatttctggtctttgtcacccgaatccctgcaccaggtaaccattctgatgtcagaccggggcattccggcgactcttcgccatatgcacggattcggaagccatacatttaaatggacaaatgataaaggcgaaggcgtctggattaaatatcactttaaaacagagcaaggcgtgaaaaaccttgatgttaatacagccgcaaaaatcgcgggcgaaaatcccgattaccatacggaagatttgttcaatgcgattgaaaacggcgatttccccgcatggaaattatatgttcaaatcatgccgttagaagatgcaaacacatatcgctttgatccgtttgacgtcacaaaagtatggtctcaaaaagactatccgctgatcgaagtcggccgcatggttctgaaccgcaatccggaaaattactttgcggaagtagaacaggcgacgttctctcccggcacattagtgcccggcgtcgacgtctcacctgacaaaatgcttcaaggccggttgttcgcataccatgacgcgcatcgctaccgtgtcggcgcgaaccatcaggcgctgccgatcaaccgttcccgcaatgaagtgaaaaactatcagcgtgacggacaaatgcgttttgatgataacggcggccgctccgtctattacgagcctaacagcttcggcggcccgaaagagtcacctgaagataaacaggcggcataccctgtatcaggtttcgctgacagtgtaagctataatcatcatgatcattacacacaagccggcgacctgtaccgcctgatgagcgaggaagagcgcgcgcgccttgtcgccaatatcgtcagtgcgatgaaacctgtggaaaaagaagaaattaagctgcgccagatcggccacttctacaaggctgatcctgaatacggcagacgcgttgccgaaggactcggactgccgtcaccaaaataacatcaaaaaacctgccggtctgcccggcaggttttttatgttcattatcaataaaaccgtttttttctcaattacacgaagtggcatgccgcaaaatgatgaaaccctttttctgacagcgccggacttttctcagcacatatcttcttggctgccggacatctcgttcggaatttacagcctgaaggcggatcagaggggcttggtatatcaccctttaaaattatccgctcccttttcgctccgggatcaggaacaggcacggctgataacagcgctttcgtataagggtgaagcggccgtgaaaagagctcctcctttgacgcatattccacaatcgtccctaaatacataatggcgaccttcgtacataagtgctccaccacgcttaaatcatgagaaatgaacaagtatgacagcccgtgctgtttttgaaggctgctgaacaaattgatcatctgcgcctggatggagacatctaacgccgccacgggttcatccataatgataaattgcggtttgagcgccatcgctcttgcaatcacgatccgctgccgctgccctcctgaaaattcatgcggataacgatcgatgaagtttgcggaaagtccgcaggcttcaagaacctccgccgctttatcacgcgcattccgcttcaccgccaattgatgctcgatcatcgcttcaccgatggcttctccgatccggcgccggggatttaaagaactgaacggatcttgaaagatgagctgcgcttccgatctgaaagttttgagctcgcgccggctcatccgaaacacatcacgcccctgaaaaaacacctctccccctgttttctcatgaagcctcaaaatggtcttgccgattgatgactttccgctgcccgattctcccgctaagccgaacacttctccctttcctatcgtaaaactgacaccgtcaaccgcttttacgggttttttatgagtctttctcatccccccatgctcctcgtaatattttttcagccccttgacctccagcaacacatcactcatctgctttctcctctctgtaaagccagcacgccgcctgatgccccttcccgaattcagtaaaatgcgggctcgatctccggcatatttccgtgctgtgttcacatcgctccgcaaaataacaagacgatcccgacaggtccgcaagctcggggacctgccccggaatggtgtaaagcgtctcccttttttgaccgataaccggcttggccgcgagcagccctttcgtatacggatgcttcggatcagaaaacagctctgcaaccggtccttcctccacaatttttcccgcatacatgacaatcacataatcagccatttcagcaaccacgccaaggtcatgagtaatgaataaaatagacgtgcgaaattgctttttcatatcccgcaataaatccaatatttgcgcctgaatggttacgtcaagcgctgtcgtcggctcgtcggcaatgatcagtttcggatcgcagcttagcgcgacagccgtcatgatgcgttgcagcatgccgccgctcagctcatgaggatatcggtgcataacctgctcggcattcgggatctccactaacgtgatcagttcaacggctctccgccatgcctctttcttactcagcaacaaatgttcgcgaatcggttcggtcagctgctcaccgattgtaaacaccggattcaaagatgtcatcggttcctgaaaaatcatcccgatttcgcttccgcggattttctgcatgtcttttggtttcagttccaacaggttctgtccggaaaaatgcaccgctccccgttcgattctccccgtctcgggaataagctgcataatggacaatgacgccatacttttcccgcagccggactctcctacaatacaaaccgtttcctcctcatgtatcgtaaagctgactccgtccacggcctttaccgcaccctcctctgtataaaaagccgtttccaaatgccttacttctaaaagcggttttttcatttcattttcacctgccgttttaccttaggatcaaaagcgtctcttaaaccgtctccaagcaaatgaatcgccacaacggtcagaaaaatggccgttcccggcggaatccacagccacgggcggagtgtaaaatccataaaatgattcgccgcttccatcatgtttccccaagaaggtgtcggcggagcaacgccaagcccgagaaaactcagcgcagattcactcagcatcgctcccgccacatgcaaagtcgccgctaccagtaataacggcaatgtgttgggaagcaaatgatagaggattttccgtttatcactaagccccaaaacttccgcggccatcataaacagctgctccttcagcgacaaaatctgtccgcgtacaagccgcgccaaaccgggccatccgatcaggcttaacatcatcataatcaggtacattctgtattcagaaggcactttccactccgacatcaccgcagccaaaatcaaaagcagcggcaggcccgggatggacatgagcatatcagcaatgcgcataatgatcatatcagcggctccccgataaaacccggccgcagccccgagtaaagagccgatgacaagcgacagcaccattgaagcaagccccacggtcagagaaatctgccccgccagcatcagcctcgtcagcacatctctcccgtactggtcggtgcccagccagtgatggattcccggatgctgattggcatttgaaatatccgtccgatctgttatgtacggagaaaaagacggcccgataaagcacaataaaaacataaaatataagaaaagaagactgatgaccgtcagcttatgctgcagcaggcggcggtacgtctgcttccaaagagaaggcggcacctctttttgttttttcattccgaacaccccctatttcagtctgacccgcggatcaaccgcggcataagcgatatccgccaagaagttccctacaatcgttaaacaagacaaaaacaaggtaaacgccatcaaaaccggataatcacgataatgcacagattcaagctgaatacgtccgacacccggccacccgaaaatctgttcaataatgatggctccggaaaacagtcccggcagttcaaaagcaagcagggtgatggccggaataagcgcgtttttcaacgcatgtttccagatgacggtgcgctctttcaatcccttcgctctcgccgttctgatataatcctgtctgatcacgtccagcatgccggagcggaaataccttgtcagcgagccgatgccgagcatagataaaatcacgaccggaagaatcatatgtctggcggcttcaagcacgtacgaaaaacctgtactcgtgctgccggtatcaatcatcccgccgacgggcaatattttcaaatccaccccaaaccacttaataaacagaaggctgataaaaaaagacggaaacgccatggaagcaaaaacaagaaacgtcacgatcccgtcaaaccatgagtatttcctgacagcggatatgacacccgttatcatcgcggctgaccatgtaacaagcaacgccaaaaacgcgacaaaaaacgaattccagacatatttccgaagcagtgacaggacgttctcctgatatttcaaagaaaacccaaaatctccgctgagcacatttccgagccatgtcacataacgctgccaaatcggctgatccagcccgtaaagcgcttttaactccttcgctctttccggagtcaggtttacattggaatcaatatagtcgcccggcagcatggcgaataagaaaaaaataataaaggacgtaccgaataagatcacaagcatttgaatgaatcgttctgcggcataccgtttcataaaaagcccctcctttccgctgaaagggcaaaatccccaggatgcatcgggtattttgcccaaccgttctattgaattgagacatttgagagacttgaactgattccagaataattgtcagcctcaagcccttttatttttccgctgaccgcccttgcgctctgacggtaatgaatcagaatgtaaggcgggttttccccgagctcccggtacagctggtgataaatctcttttcttttgctgatatcaagcgtgccggctcctttctctatcagccggtccgctttcggattggaataccccgtcacattattgggatggccggaagccagcttttccaccgtgtcattcggatcaaggatctgcgaggtggaaacggcggcaaggtcatattgtttgtcattgattttcgctacttctgtattaaaatccatcacttccggttttaatgagattccgatgtccgcataattttctttcgctatcgggatgaaatcatcatccgctttagatgtgtaatagctgatttcaagctttttgccgtttttttcacgtacaccgtctttgcccgttttccagcctgcttcgtcaagaagctttttggctttttcagggttaaacgcataccgattgacacctttgtcatcataagcccacgaaaccggagacaccggaacattcgcgacctctccgtagcgtttaaagcggacatcgacgattttttgacggtcaagtccgtaaataagcgcctgggacactttcttatcttgaaaaggcggacgcttgtgattgacgtacacaagcccgtaatcattcacgacagatacgcttatattcgcaaaaccgagactttttaaatgctgaaccgtatcatcatcaggtgagaaagaagcgtaatcaaggtcacccgtttcaaacagctgaagggaagttgacggatcgataattttataaatcagcttttccgttttcggttttccggcataatagtgttcattagcctgatagcgtatttcctgtcccggaaggtattctgtaaattgataaggtcccgctccgagcggtttggcataaagctcttttaaatagtccagtttgccgaattgatatttcttcccgtagtaggcttctgacagcacctgcccgcccaaaagaagcagcgacttcgcactgactttctcagtcgtgatttgaatggttctgtcatcaaggacgcgaatgccctctatcgtctttgcctttccttctttgtaagccttaccgcctttaatataagccgtggtgatatcttcatagcccgcgtatgcaggatcatgcagcagtgttaaagtgaatgcggcatcctttgcggtcagcggtgaaccgtcgctgaaaacgagattttttcttaaacggaacgtgtatgtaagctgatctttggaaattttccagctttccgcaagagccggggcaggcttccccgttttatccagtttgactaacggttcaaaaataggatctgtcgcatttccatcccagccgttttcgtaaaagtacggcagaaacacgccgcccggcgcggaaatcccagcaacaaaagtgtcagttctggctttcgatttagcgggaatcgccgccggatgagaagctttaaattcctttgtcttgacatgggtgatacgtgtttcttcctttttatcagccgcagatgacggttcttccccggcactccctaacgcgcaccctgataacatgatggataccgacagcgcgagtaccgttgttttcaacctccattttctctccttcatctttatcgaacccccgcatgcttttcatctatctttatataaatctgctccatctgttcctcatttctcataatctcccgtttgtttttctctacaagcagttcgaaattcaatgtgtgttttctgtactttttccgcttttttctctttttgcgcacatgtgataccttttttaacgccacttttcatccctccgcttttcatttaatgactttcacgcaaaaaaggcccttatctgtttaatagataagagccttcggtgatccgatcagccatcgtttggaaatatgtaatgattatgttaattcatacaatccctacctgtcaactacaatttaaaatatcgtgtccttccgggggttttcctcatacactctctcatttttccgcatatgctagaaaacatagcagattacaagtgaaagtgagtgagaatgtggaaaagacaacattgagcggtcgcatcgtcaaaaaagatgacccggactataatgccgcaagaaccaatttcaatttaagcctgcaaagatatccagacatcattgtgttttgccaaaacaaacatgacgccctcaatgcggtgagatgggcacgtgagaacaatgtgcctttccgtatcagaggcggaagacacagctacgaaaatttttccctgttaaatgacggactagtcattgatctcagtgaaatgaagaaaataagagtaaatgaggataagcggctggtctcgattgaagcgggagccgaattaggggaagtctaccggacactctggcggtacggcttgacccttcctgcgggaaccattgcgaatgtgggaatcacggggctgacgctcgggggaggaatcggatatttaacaaggactgccggacttacttgcgatcgtctcctccagctcgaaatgatcatagcggacgaaaaagcgggtgctgacttgatcacagtcaaccgctcaaagcactctgatctattttgggcatctcagggcggagggggaggcaacttcggcattgtcacatccatgatgtttaaagccgtgccgatctcgtgcgtgtctgttttttctgtcacttggggctgggatgatttcgaggaagtatttaatacgtggcagcgctgggctccatttacagacaaccggcttacctcatcaattcagttttggcctaaggaagtcaaccgcatagaagcactcggtcaatttaccgggacaaaagaggagctgaaagaactgctggctccgttaatgaaagcgggaaaaccgacaagcggcatggtcaagacagtgccatttattaaagcagcagccttttttaacagcccgggaggcaatcagccgcaaaagatgaagcggtcaggatcctttattgaaaaaccattatcaacacgcgcaatatccactttaaagcgctatttagagcacgctccgaacgaaaacgccagtgtctggcagcaatctctcggcggggcggccggacggatcgctccggaccaaacggcattctactatcgcaacgcaatcattgcccaagaatatattacaacttggacatctgctgaagaagaaagacaaaatgtccgctggatcgaaggactgagaacgtccctatcaagagaaacgatgggagattatgtgaattggcctgatagagaaatcagaaactggctgcaaacgtattacggagaaaatgttcaccgcctccgtcaagtcaaaacgaaatatgatccggaaaatatattccgcttcgagcagagcattccgccgcttcgccgttcaccgtttttctaaaaaagatgaagatggatacactccatcttcatcttttcttttattgatataagcggcttcccttctctgcaaactcttttgctttttctttcagcccttcattgacggcctcgtcttcagtaagtccgttttccttcgcataatcacgaatatcctgagaaattctcatgctgcagaacttcgggccgcacatcgaacagaagtgagccgtttttgcgccttcagccggcagcgtttcatcatgatattccattgctctttcaggatcaagcgacaaatgaaattgatcacgccaccggaattcaaaccgcgccttagacagagcatcgtcacggatctgtgcacccggatgccctttagcaaggtctgcggcatgtgccgcgattttgtacgtaatgacgccttctcttacatcatcacgattcggcagccccaaatgctccttcggcgtgacatagcaaagcatcgccgtcccgtaccagccgatcatcgccgcgccgattgctgaagtaatgtggtcatagcccggagcgatatccgtcgttaatgggccgagcgtgtaaaaaggcgcctctttacaaatttccagctgcttgtccatgttttccttaattttatgcatcggcacatgacccggtccttcgatcatcacttgcacatcgtgcttccacgcaatctccgtcaattctccgagagtctccaattccgcaaactgcgcttcatcattggcatccgcaatcgaacccggacgaagcccgtcaccaagtgaaaaagcgatatcatagctcttcatgatttcacaaatttcttcaaaatgcgtgtacagaaagctttcctgatgatgagccaggcaccattgcgccataatcgccccgccgcgggatacgattcccgtcgtgcgtttagccgttaacgggacataacgaagcagtacgccggcatgaatggtgaaataatccacgccctgctccgcctgctcaatcaatgtgtcacgataaatgtcccacgttaaatcctcggcaatgccattaactttttcaagcgcctgataaatcggcaccgtccccacaggcacggggcagttgcggataatccattcacgcgtcgtatgaatgtcttttcccgtggataaatccatcatcgtatcagcgccccagcgaatcgcccacgtcattttttcgacttcttcttcgatagaagatgtaacagccgagttgccgatattggcattaattttcacatgaaaattccggccgataatcatcggctcgctttccgggtggttgacgttagaaggaataatcgcccggccgctggctacctcgtctctgacaaattcgggagacacatgctcgcgaattgcgataaactccatttccggcgtaatgatgccttttctcgcataatgcaattgtgttacatttttccccggcttggcccgaagcggtttccgctgcaggccggggtattcggcagcatgatcttcttttttatagccgttgtcttcaggtctcacggtccggccgttatattcttctacttctccgcgcccggtaatccactttgtgcggagcgcccccagaccttcatgaatatcaatctgtacatccgggtctgtatacggtccgctcgtatcataaacacggaccggcgcattctcctcttccccgaatgcccccgtagtcgcactcaggctgatttcccgcatcggcactcgtatgtcgggcgaagaaccttctgcataaacctttttactgccggaaaaactcgacataatggaaatgttcgcttgctgtactgattgattttgcatacaaatctctcctttatcatttgaataacagaaccaagctcagcaccagcacaaaaaaaccgggttcaaagaagaacccggttttgcagtcagaaagaaactattattgttttcctcaacaataataaaacctttacttccccacgctggtacgaaccagatcaggtccaaagggttaagaagccgccgcttctctctcagcccgctcagacgggcacccccagtaactattgatttcgctctcatcgtaacataagttgtgtacaaaaaaaagcatattatcaaaattcagataacggaatggtcataagctctgtttcccgaacgccttcttcggtattaaaaacccgataaccctttgcggtttcccgggaagagacagcccggaacagctgaccgtctttataatgaagcgcagcgccgtcatcagcggcatagccctccctgagtatcttttcggaaatcagacggtgatacaccggccggcgctccgcttctccgtcatagtgcggacaaaagctgcccggcaaaaatcctaaagctgttaactctcgcaaatcccccgctgaatccgtcaccccttcttcataccagcaaatcgctccggcgctgagacccgctaagatgatgccgttttcccaagcctcacgaagaataaggtcaagcccccactctttccataagacaagcatattgcgcgtatttccgccgccgacatatataatatctttcttcatgagaaaggatctgagatcagaacccggcggtttaaacagcgacaagtgatccggctcacaccgcagcttttgaaaggcctgataaaacctgccggtatatttctccgaatctccgcttgccgtcggcaaaaaacaaactttcggctttgaccgcgccgactgctctaaaatatactgatccagcacaagatgatccggctccatggaaaaccccccgccgcccattgcaataatctgcttcaatgtcatcacttctttttttctcaagtataacagctcattaaaaaggcgttatctcaatttcggataacgccttcaaaaagtatttgttatctgaaaaatacgcaccgtataacacaacggagatccccgcggcgttaatcgccggaacaagcttcgaacgggcatacttcgcaacattgatccccaacaccgtattatcactgaggggagaagcaaaccaaatgttccgctcgctaataataagctggtatgtaactgaaccgccagcgttacgccgagcgccccaagtcccccaggatgacccgataaaatgggatataacagcccccagtataaaaagagacggcgcaataaacatatgagggctccatgatgttaaatgagaagtaacatatttcgagaatcccagattttcagctactgctgttacggcccaaatcagcgataacataataataacgttgaccaattcgtttccgcccttaataaaatgggtaacaagctcgcctgcaggaaagcgctgaaacataaaaagagcaaatactgcaataaccgctgccaataatgcgcgcttttgaatggccgccccaccagctgagaaacagtgttaatagcaaaaacagcccgatcggaaagatttaactccacggccgaatcggtgtttccttaatataagcacggtgcgccgaatccagctcctcctactgcaggtatcatgttttcacaagccttggagatattttcatacaacaaaaaaggcttctacaatatgtagaagcctttgtataccggtggccggggtcgaaccggcactccagaaggaacacgattttgagtcgtgcgcgtctgccaattccgccacaccggcatataatgcgtcgtgttcaaccgacgtatataaatataacatgcattctataaagagtcaatggttttagtaaagttttttcaaatggtaatgcagtatatacgatacaagcaagaaacttatattgatagtcttcacgcttttattatataaaaaaagcgacctgcaatatgcaaatcactctcatatatgttttataataagaaaattgatgaccaatttaacataattcgctcaaagttaaattggtgccgagggccggacttgaaccggcacggtagtcacctaccgcaggattttaagtcctgtgtgtctgccaattccaccaccccggcaatagaaaggcgacacccggattcgaaccggggataaaggttttgcagacctctgccttaccacttggctatgccgccgtaatttggagcggaagacgggattcgaacccgcgacccccaccttggcaaggtgatgttctaccactgaactacttccgcaacatgtaaaagaacttaatacatcttatgctgttgttttcaaaaaaatgcaactgggctagctggattcgaaccaacgcatgacggagtcaaagtccgttgccttaccgcttggctatagcccaatgataatatggggcgattgatgggaatcgaacccacgagtgccagagccacaatctggtgcgttaaccacttcgccacaaccgccataatctgaagatgaataaataatatagtggcaggggcagtaggaatcgaacccacaccggaggttttggagacctctgttctaccgttaaactatgcccctatttataaaatggtggaggggggcagattcgaactgccgaaccctgagggagcggatttacagtccgccgcgtttagccacttcgctacccctccatcatttagagtgccggccagaggacttgaacccccaacctactgattacaagtcagttgctctaccaattgagctagaccggcaaatggtggctcgggacggaatcgaaccgccgacacacggattttcagtccgttgctctaccaactgagctaccgagcctttttataaatggcggtccggacgggactcgaacccgcgacctcctgcgtgacaggcaggcattctaaccaactgaactaccggaccatttttttggttgcgggggcaggatttgaacctgcgaccttcgggttatgagcccgacgagctaccgaactgctccaccccgcgatgataatggtggaggatgacgggctcgaaccgccgaccctctgcttgtaaggcagatgctctcccagctgagctaatcctccatcatataagtgacccgtacgggattcgaacccgtgttaccgccgtgaaagggcggtgtcttaaccgcttgaccaacgggccctggtattttttcgtttgttatgtattgataattagtggcggagagcaagggattcgaacccttgagacggggttaccgcctacacgatttccaatcgtgctccttcggccactcggacagctctccataattggctccgcaggtaggattcgaacctacgaccgatcggttaacagccgatagctctaccactgagctactgcggaatgaagtctgcctggcgatgtcctactctcacagggggaaacccccgactaccatcggcgctgaagagcttaacttccgtgttcggcatgggaacgggtgtgacctcttcgccatcatcaccagacgttttagtgacatgtattattatactatgtatttcggaaaaagcaagagtttttttaaaaaattctctcaaaactagataacagtaagcatacattcaaattggttaagtcctcgatcgattagtatctgtcagctccatgtgtcgccacacttccacctcagacctatcaacctgatcatctttcagggatcttacttccttgcggaatgggaaatctcatcttgaggggggcttcatgcttagatgctttcagcacttatcccgtccgcacatagctacccagcgatgcccttggcagaacaactggtacaccagcggtgcgtccatcccggtcctctcgtactaaggacagctcctctcaaatttcctgcgcccgcgacggatagggaccgaactgtctcacgacgttctgaacccagctcgcgtaccgctttaatgggcgaacagcccaacccttgggaccgactacagccccaggatgcgatgagccgacatcgaggtgccaaacctccccgtcgatgtggactcttgggggagataagcctgttatccccggggtagcttttatccgttgagcgatggcccttccatgcggaaccaccggatcactaagcccgactttcgtccctgctcgacttgtaggtctcgcagtcaagctcccttgtgcctttacactctgcgaatgatttccaaccattctgagggaacctttgggcgcctccgttaccttttaggaggcgaccgccccagtcaaactgcccacctgacactgtctccccgcccgataagggcggcgggttagaaggtcaatacagccagggtagtatcccaccgatgcctccaccgaagctggcgctccggtttccaaggctcctacctatcctgtacaagctgtaccaacattcaatatcaggctgcagtaaagctccacggggtctttccgtcctgtcgcgggtaacctgcatcttcacaggtactataatttcaccgagtctctcgttgagacagtgcccagatcgttgcgcctttcgtgcgggtcggaacttacccgacaaggaatttcgctaccttaggaccgttatagttacggccgccgtttactggggcttcaattcgcaccttcgcttacgctaagcgctcctcttaaccttccagcaccgggcaggcgtcagcccctatacttcgccttacggcttcgcagagacctgtgtttttgctaaacagtcgcctgggcctattcactgcggctctctcgggcttgcaccctaacagagcaccccttctcccgaagttacggggtcattttgccgagttccttaacgagagttctctcgatcaccttaggattctctcctcgcctacctgtgtcggtttgcggtacgggcacctctcacctcgctagaggcttttcttggcagtgtggaatcaggaacttcgctactataattcgctcgccatcacagctcagccttcacgggaaacggatttgcctatttcccagcctaactgcttggacgcggatatccaataccgcgcttaccctatcctcctgcgtccccccattgctcaaatggtgaggaggtggtacaggaatatcaacctgttatccatcgcctacgcctttcggcctcggcttaggtcccgactaaccctgagcggacgagccttcctcaggaaaccttaggcattcggtggaggggattctcacccctctttcgctactcataccggcattctcacttctaagcgctccacaagtccttccggtcttgcttcacagcccttagaacgctctcctaccactgttcgaagaacagtccgcagcttcggtgatacgtttagccccggtacattttcggcgcagagtcactcgaccagtgagctattacgcactctttaaatggtggctgcttctaagccaacatcctggttgtctaagcaactccacatccttttccacttaacgtatactttgggaccttagctggcggtctgggctgtttccctttcgactacggatcttatcactcgcagtctgactcccaaggataagtcatcggcattcggagtttgactgaattcggtaacccggtaggggcccctagtccaatcagtgctctacctccgagactcttaccttgaggctagccctaaagctatttcggagagaaccagctatctccaggttcgattggcatttcacccctacccacacctcatccccgcacttttcaacgtgcgtgggttcgggcctccattcagtgttacctgaacttcaccctggacatgggtagatcacctggtttcgggtctacgaccacgtactcaattcgccctattcagactcgctttcgctgcggctccgcatcttctgcttaaccttgcacgggatcgtaactcgccggttcattctacaaaaggcacgccatcacccgttaacgggctctgactacttgtaggcacacggtttcaggatctctttcactccccttccggggtgcttttcacctttccctcacggtactggttcactatcggtcactagggagtatttagccttgggagatggtcctcccggattccgacggaatttcacgtgttccgccgtactcaggatccactcaggagagaacgaagttttgactacagggctgttacctcctatggcgggcctttccagacctcttcatctacctcgttcctttgtaactccgtacagagtgtcctacaaccccaagaggcaagcctcttggtttgggctggtcccgtttcgctcgccgctactcagggaatcgcatttgctttctcttcctccgggtacttagatgtttcagttccccgggtctgccttctcatatcctatgtattcagatatggataccactccattacgagtggtgggtttccccattcggaaatctccggatcaaagcttgcttacagctccccgaagcatatcggtgttcgtcccgtccttcatcggctcctagtgccaaggcatccaccgtgcgccctttctaacttaaccgttaaaaagaatcactacgtgatatcttgcattactaattgaatgtgaattacttctgttatctagttttcaaagaacaacgcataggacatgctaacacatgcgttgccacaggaagtggcgcatttagcaggtgttcctatgttttgaaggaatgatccttcaaaactaaacaagacagggaacgttctgtttataagacccgaggtcttatattccgttaaaatccttagaaaggaggtgatccagccgcaccttccgatacggctaccttgttacgacttcaccccaatcatctgtcccaccttcggcggctggctccataaaggttacctcaccgacttcgggtgttacaaactctcgtggtgtgacgggcggtgtgtacaaggcccgggaacgtattcaccgcggcatgctgatccgcgattactagcgattccagcttcacgcagtcgagttgcagactgcgatccgaactgagaacagatttgtgggattggcttaacctcgcggtttcgctgccctttgttctgtccattgtagcacgtgtgtagcccaggtcataaggggcatgatgatttgacgtcatccccaccttcctccggtttgtcaccggcagtcaccttagagtgcccaactgaatgctggcaactaagatcaagggttgcgctcgttgcgggacttaacccaacatctcacgacacgagctgacgacaaccatgcaccacctgtcactctgcccccgaaggggacgtcctatctctaggattgtcagaggatgtcaagacctggtaaggttcttcgcgttgcttcgaattaaaccacatgctccaccgcttgtgcgggcccccgtcaattcctttgagtttcagtcttgcgaccgtactccccaggcggagtgcttaatgcgttagctgcagcactaaggggcggaaaccccctaacacttagcactcatcgtttacggcgtggactaccagggtatctaatcctgttcgctccccacgctttcgctcctcagcgtcagttacagaccagagagtcgccttcgccactggtgttcctccacatctctacgcatttcaccgctacacgtggaattccactctcctcttctgcactcaagttccccagtttccaatgaccctccccggttgagccgggggctttcacatcagacttaagaaaccgcctgcgagccctttacgcccaataattccggacaacgcttgccacctacgtattaccgcggctgctggcacgtagttagccgtggctttctggttaggtaccgtcaaggtgccgccctatttgaacggcacttgttcttccctaacaacagagctttacgatccgaaaaccttcatcactcacgcggcgttgctccgtcagactttcgtccattgcggaagattccctactgctgcctcccgtaggagtctgggccgtgtctcagtcccagtgtggccgatcaccctctcaggtcggctacgcatcgtcgccttggtgagccgttacctcaccaactagctaatgcgccgcgggtccatctgtaagtggtagccgaagccaccttttatgtctgaaccatgcggttcagacaaccatccggtattagccccggtttcccggagttatcccagtcttacaggcaggttacccacgtgttactcacccgtccgccgctaacatcagggagcaagctcccatctgtccgctcgacttgcatgtattaggcacgccgccagcgttcgtcctgagccaggatcaaactctccgataaagtagtttgactgactacgcacatcgctgtgcgatttatttaaaactttgaattaacaggtacgttttgtcttgtttagttttcaaagatcatctcaacctcatctcgaggcgactttttcagtataacatttcagcgatttgctgtcaaatgtttttttgtttttatttctccgccgctgtgagctttttggtgaagcgcatcagcgacgtttaataatataccatgcctatgattcagcgtcaacactttttttgaaagaatatcctcgatgatatacttcctgccctttggtctctatttgagatacttcaacaaagcctttttccgtcaggtaatcaagcatgacaccgagatcttgggtgaagtgcaccagttcagggtgctgaagcaattctccaaactgccacatttctttttctttcatcacctgaaaaaggtgcgcagaaccgatttcagcttttgaatggatgagaaaatcatttgctaagaataataattcgagccttttctccaagctttcgtgactctcgacaagttcggaatatagcttatatacctgcggctcaatgtgacggacctggttccagactgtcgtttcgggataaaacccccggtcaatcacttctatgcgggccaagtggtgaagagcgtgcactaccgcataatatgcatccagaaaatgatcagcttcaaaaaacgcttttccttctacaaatcttctgatcagcttgccgtattccattccgatctttaatttccgctcggcgaaaggaaaagtgctgagccggtcattgagttcagatatatattcattgcggtcaaacagcactttgccgttgatgatccaatctatgactcttctatttgtcccaagcagaatccattcctgaagcagagcatccgttacaatatgtaaagaagcggttttgtgttcgaattcataatgctttataaaaagaggttcatcagcctgtttcacaatgacaagcatgaccgcatcaaagttatccgtgatggatgatgctttactccttctctcaatcataaggacggccagcgtatcgggatgacttgctctttcttggtaaattggacggagaagattgtccattacgattcctccaatgcgattgtttcactagctattgtttctacatttctatgataaaacatgaaagtccttttttctaaacacattgcactattataacaaatttcctttcaggtgccatatttattcttcccttttcttacgaaaacatgaagaatatgccatatgttttgtgctatagttaaacgagagggggatggacatggcgaaatactcaagcaaaattaataagatcagaacgtttgcgttaagtttggttttcgttgggtttatcattatgtacatcgggctgttctttaagcagtctgttttgcttgccagcttgtttatgattctcggcctgctgtcgatcggactcagcaccgccgtttatttttggatcggcatgctgtccacaaaagcggtccgggtgatgtgccccgcttgcgagaaagaaacgaagattctgggcagagtggatatgtgcatgcattgcagagagccgcttacattggataaaggattggaaggcaaagcgttcgatgagtcttataacagaaaaaacagtgtaaaataaacgaagctgaccgtatcaaagcggtcagcttcgtttagtggttttcttttttggaacattcttggcagacgccgtaaatctccaaacggtggtggcttaccttaaaccctgtgacgtgagcagcaagctgttccacttcgtcaagcccgggataatggaagtccacgatttttccgcagctttcacaaatggcgtgataatggtcagaggtgacaaagtcaaatctgctggacgcatctccgtacgtcagttcctttacaagccccgcttcccggaatacacgcaaattgttatacactgtcgcaacactcatattagggaatttcccttccaaggctttatatatatcgtccgctgtcggatgtgccatagaatccacgagatattccagaatggcatgacgttgaggagtaatccggactcccgtatccttcaacgtgtctaaggcttcttttaattcatgtgcagccatccgtcatgcacctctcttctaaaaaagattcttactttataatgtttataattagtgtacatctttttccggtctcctgtcaaatgtaatctgaagaaaaccccgtgagttcagcatttgtccattaattagacgcaatttgttccaattcacgaagcgcctcggcaacgtgatctttcacttttacctttctccactccttcacaagacggccttctttgtctaacaaaaaagtggatcgctcgatacccatatattctttcccaaaattcttcttcagcttccacacatcaaaagcttccgccagtttgtgctcatcatcaacgaggagctggaaaggaagatcgtgtttttgcttaaatttttcatgtttatcacggctgtcagggcttactccgatgataaccgcatcaagtcccgcgaaactttcgtgctgatcacggaaatcacatgcttccgtcgtgcatccgggtgtcatgtctttcggataaaaatagagaacgacgtacttccctttaaaatccgtcaatgctacttcttccccgctgtcattcactaatttcatatccggtgctgtttgtccgatttcaatcgtcatttcttatacctccgggttttttattaagcgtatccaattcacgttaagattacaaccgttatcccccggctcttttctggaagcatgaacccgttgtgctcgcaatgaagcatgctacaatagaacatgatgtaaggagatattaggagggtcattttttgtatacaaaatcagttgaacttcataaggaagcgttagagcatatcgtcggaggcgtgaacagcccgtccagatcctataaagcggtaggcggcggttcacccgttgcgatggaaaaagcgaacggcgcttatttctgggatgtagacgggaatcagtatatcgattatttagcggcttacggtccgattattaccggacatgcccatccgcatattactgaagcgattaaaacagcggcggaaaacggcgtgctgtacgggacgccgaccaaacatgaggtcactttcgccaaaatgctgaaggaggccattccttcacttgataaagtacgattcgtaaactcaggcactgaagcggtgatgacaacgatccgggttgcacgcgcttatacaggccgcacaaaaatcattaaattcgccggctgctatcacggccattctgatctcgtacttgtcgctgcgggttccggcccgtctacgctcggcacccctgattccgccggcgtgccgaaaagcatcgccaatgaggtcattaccgttcctttcaatgatattgaaagctacaaagccgcgctggataaatggggttcagaaattgcagcggttctcgtcgagccgatcgtcggcaacttcggcatcgttgaacctgaagaaggatttttagaacaggtaaatgaattgacccataaagcgggcgcgctcgtcatttatgatgaagtgatcacggcgttccgttttatgtacggaggcgcgcaggatcttcttcaagtgaagcctgatttaacggcgctcggtaaaattatcgggggcggcttgccgatcggcgcttacggaggcaaaaaagagatcatggagcaggttgctccgctcggcccggcatatcaagccggcacgatggccggaaacccggcatctatcctatcaggcatcgcctgcctggaagtgctgaaggaagaaggcgtttacgagcggcttgatgagctcggcgccagacttgagcaaggcattctcgcccatgcggagacacatggcattaccatcaccgtcaaccgtttaaaaggcgcgctcacggtttacttcactgatgaaaaaatcgtcaattacgagcaggcggaaaatacggacggagaagcattcgccaagttcttcaagctgatgcttgaacgcggcatcaatctcgctccgtcgaagtatgaagcttggtttatcacaaccgcacatactgaagaggatatcgacgccactttacaagccgttgaagatgcgttcagacatatgaaaaaataacttctgaaacaagcgggagcccggggcttccgctttttctttttgtccgatttgtgagataatggttttttcaaaaaaagaccttgaataattggtatgatccctgtatattactttattgtttagcaaatcagccgacagggaaatgtaagtgtcagccgttcgttcggcacataatttattagagaaaggaatgcacgcacaaaccaatgaaacttggtgcccgcatttttaaaacagggattgcgattacgctcgcgctctacttagcatcatggatcggacttccgtcgccgatctttgccgggattgcagctatatttgccatacagccctctatttacaggtcttttcttatcattattgatcaggttcaggcaaatatcatcggcgctgtcatcgctacggtattcggactgattttcggaccgagtccgattatgatcggattgaccgcagtgattgtcatcacgatcatgttaaaactgaaaattgaacacaccatttcgattgcgctcgtgacggttatcgcgattttagaaacaccgggaaacagcttcctgacgttcgctctgatacgaacaagcaccgttattttaggcgtgctgtcttcttttattgtgaaccttgtgtttcttccgccgaaatacgaaacgaagctgactcatcatacggttgaatataccgatgagatcatgaaatggatcaggctgacgatgcgtcagtctacggaacactcgatattgaaagaggatattgagaagctgaaggaaaaaatgatgaagcttgatcatacgtaccttctttataaagaggagagaagctactttaagaaaacgacgtatgtaaagtcgcgcaagcttgttttattcagacaggcgattattacggcaaatcgggcgcttgatacgctgaaaaagctgcaccgctatgaaaacgagatttatcatatgccggaggaatttcaggagacgctgacagaagaaattgattatctgcttcattggcacgaaaggattctgatgcggacggtcggcaagatcaaaccgcatgatgacgatgctgaagaaagcataagatataaacagcttttgacgaagtctttcttgaaaaatcagcagaactgcgaggatgaactgcttgattacaatatgctcagcattatggctgcggttgcggaataccgcgagcagctggagcatctcgatacgctaattacgagttttcagacataccacccgaaagacagcgaattagaaacagacgaagagtaacccggtgcttccgtaaaaccgggtttttttgcattcaaaaaacgtatgccgcccattcggacggcatacgtttttgtatcagttcaaattctgaatcgtaaataagtgtctgtactggccgccttgggccattaattcctcgtgcgtgccggtttcgacgacggcgccgttttccatgacgacaattttatccgcgtgcgtaatcgtggacagtctgtgggcgacgataaaagtcgtccggtttttcgcaagcttttccatcgcttcctgaatgtagtgttcactttcaagatcaagagccgatgtcgcttcatccaagatcagcagcggcggattttttaagaatacacgggcgatcgaaatccgctgcttctgcccgcctgacaatttgacgccccgttcgccgactttggtttcgtagccttcggggaagttcataataaattcatgggcatttgccgctttcgcagccgcaaccacctcatccagagacgctcccggtttaccgatagcgatattttcacgaatcgtctcactgaacagaaacgtatcctgaagcaccattccgacttgattgcggaggcttctcgcttcataatcgcgaatatctgtgccgtcaatcagcaggctgccgccggatacatcataaaaacgcggtatgaggctgacaagcgtcgattttccgccgccgctcatcccgacgagcgcgacggtttccccttttgtcacctttaaggaaacgtcctgcaaaatcgtttcttttccttcctcataacggaacgagacatttcggaattcaacttcacccttaatgccgtcagcttttaatgcattcggtttatcagtcagttcatacggctcgtcgataaattcaaatatgcgatccattgaagcgatcgactgggtcagcgtcgtcgatgagttgatcaatcttctgaccggattgtacattctgtcaatatagccgacgaacgcaaccatcgtccctaccgtcagcgggccgtttatgacaaaataacccgcaaacgcgataacaagcagcggcgccaaatccgtaatggtattcacaactgcgaacgttttcgcgttccaattcgtatgacggatcgctttgtccagaaaatgtccgtttttttcatcaaaattggcttgttcataatcttcaatggcgaaacttctgataacgggcatcccctgaactctttcgtgcaaatgtccctgaacttgggcgagtgcctgagaacgctcacgtgtcagttttcggagacggccgtaaaagtatttcactgaaattccgtataacggaaacaaaatgacagatatcaatgtcagcttcacatcgagtgtaaacataatacagatgacgatcagcaccgtcatcatatcaagccagatattcatcagtcccgttatgacaaagtcttttgtctgttcgacatcatttatcacccgggaaatgacttcgcccgttctcgtgttggcataaaacctcaggctcaatttctgaatatgatcaaacaatacccccctgatatcgtagagcacccggctgcccgtccattgtgcgaagtattgccgatagtactctaccgggggacgcagaattaaaaacagcacgaacatgatgcccattatcgtgaatagcgatgatgttttagcgcttgccgttccgctcccttgaataatgtcatcgaccacgtattttaacagaagcgggagagccagcgggatggagaattttataatgccgattaacactgtgataaaaatttgttttttataaggttttacaaattgcatatagcgtctgattacgcccacactttatccccctctctctttaaggcgtgtgagcccatgtgaaaaacctgttgacaccccaacaggttttttattgtattctttattttgtatagcgcagataccgttcataccacatatcaacaaattccggagcaaacggtcctttccgctgatgaatccaatgcagcagcgtattcagatactccttcagaatgctgtcgatctctttagggtaattcattgatttgcggtggtcatcgtattcatcctcgtcaagaatgttatacgtcatatccggaaacaccttgacatccaaatcgtaatcaatatatttgatggcctctccgtcataagcgaacggcgagctgatgttgcaataatagtgtaccccgtcatctctcagcattccgatgacgttaaaccactgacgggcatgaaagtagcagatcgccggctctctcgtcacccacgtccgtccgtcggattccgtcaccattgtccggtcgttggctccgatgatacacaattccgtactttttaaaatcgtcgtttcattccaaattcgatgaagcagcccgttatgcttatagctgtgaatttgaatggtttctccttccttgggatatcccatatttctcccctactttctgtaaagccctgcagtcaatgcagccgcaattgctttccgacaagtcttttcactattataacgttacgaattaaaaaatgaaaataaaagaaccactccgcttccggaatggcacattcatttctgcacataggaagacggcttttccgtgctgcgataagactggatgacttgctctgtctgcctttggaataactcctgtatgccggccaggtcttttcgctttgtcgcaatttcgtcctgtacattgtccagctttgcatctctttccagactgatgagttccgcttccacctgccggcagcggtcaagttctgactgcagctcgagaagctgatccatgattttcatctgttcacttacaagcttttcaaactctgacatcgggttcctccttaggctttaggttgatactccttaccatttcgattttacgccggaaaaccctttgactcattctgtagaggaatcacaagttttgtcgttttagcaacagaaaaaagcacttccatccgaagatgaagtgctttttcgtttcagtgattagctgttttgctgtttgttttgttcagcagattggttttgctttctaacctgctgcgcatcagtttcactgccgaattcagtgccgtattgaccctgaccggaagctgattgctggttttgtcttttcacctgctgaacgtctgttttgctgtattttgagtttgccattgttatcacctccacgcactttagaatgcgcaggagacgataaggctattcatctttttttaaaacttatacgagcagagagcgtccgccgtcaataatgatggtctggccgcggatcatgtccgcttttgaagaaactaaaaactccaccgtgtcgatcatatctttaatctcgaccattctgccggccggcgtattttggcgggcatcttccagcagttcatctctgttagggaaatgcttcagcgcgtccgtatcaatcgctccgcctgacaccgcgtttacgatgatgtttttcggagaaagctcaaccgccagataacgggttaacgattctaaagcggcttttgagacaccgaccgtcgtatagttttcaagatagcggatgctgccgagcgagctgatgctgacgatgtggccgcctccgtttttctccatcatctttgccgcttcctgggcgcagaaaagcaatgctttcgcgttgatattcatcgtccagtcccagtgtgtttcttcgagttccataaccggtctcagcacgcctgaagccgcattattgacgaacacgtccagtctgccgaatgtttcgtcaatctggcggaacatgtctttgatttttgccggctggccgacattagctttaataacgagcgttttaacgccgagtttttcaatttcttcggcggtttctaatgccgcttttttactgcgggcgtaattgatgacgatattgtatcctttttccgcgagtctgatggcggctgctttcccgacgcctcggctgcttcccgtgatcagtgcgcatttattttgttccatttttcctcagctccttgctgtgtatagttcttttcattcaacaaacaataaaagcaatatctgttgaaaggggtcttttatatgtatgtcggacgtgatatgggcgaattggccatgatgcccaaacaagattggagagattcagagctcgcctatttccatcatgccttccagcaaattatgccgtatttaaacgaagaaggccagtccaaataccgggaactgattcaggaaatcgaagcccgcggcggactgaaacggaatgaagcggattacggccacggcactcgcgtcagctatgactgacgctttttagcggccgctttcttccgccattttccatatcttttgatgggaaacgggaaatgcgtattccttgagctcctcttttgtgacccgtatgaattccgttgtatccgacacttgttttactttaccgaaaaagaccgaaatattccagacgagatgggtgaaaacatgttctacgatgccttccagctccccgatttcagcggttattcccatctctttttctaaataggcttcaagctgctctctttcggttttgattcctttctgggtttcggtattcggaaactcccacaagttggcgagcaagccttttggcggccgtttatgaatatagacatcgccttgttcgtctgtcagcacaacggctgccattgtttttattccgggctttttctttttgcttttaacgggcagctcccgctctgtcccttccgcaaatgccgaacagtgcttttgtacggggcaaagcaggcatgacggtgatttcggggtgcagatgatcgcgccgagctccattaaaccctgattgaattcagatggtttttcatgagaaatgaaagcggataccgcctgttcgaaaatggttctggttttaggttttgcgatatcgtcccatatggaaagaattctcgacatgacacgcatcacattgccgtctacggcgggaatcggtttgttgtatgcgatgctgagcacggcgccttttgtataagggccgacgcctttcagtccgccaaattccttttccccggcagggacgactcccccgtaccgctcatgtacttcttttacggcactttgcagatttcttacacgggagtaataacctagcccttcccaggctttgagcactttttcctcatcggcttcagcgagcgccgaaacggtcggaaattgctcaacaaaccgccggaaataaggaatgacggtatctacgcgcgtctgctgcagcatcacctctgacacccacacccgatacgggtcctgattttctctccacggcagaattctctgttctctttcgaaccatgtaattaagtcctcgcgaaatttgtctatatctttttgtttcattttttcttcaagtgcgttcatatcttctcctcagatgtttcgggttccgcttttcttgacactgtattttggtgtaaactaagggcacgttacgataatatgttacattaaatagtgataaagaaaaagcggaaacatatgagaacggcggataaacgccatgattgggcaaacagaaaatggggaatatcttataatgcgaaatatgcgggcggctgatttttaacgcctgctaggaggtcaacaatggatactggcactcacgttgtcatgggtatcgcgcttggcggaatcgcaactcttgatcctgccgtcggcatgcacaccccaatgtctcaggcagttatgatcgccgcgcttgccggctctcaggcacctgatattgataccatattgaagctgaaaaataatgccgtttatattcgaaatcatagaggattcacgcactccattcccgccgtattattttggtccgttctgattccgggcattttgtttatgttttatccggaagcgaactttttgcacctgtggctgtggacgcttctggctgtcgttttgcatgtgtttgttgacatttttaacgcgtacggcacacaggccatccgcccgttttcgagaaaatggatcgctctcggtttaatcaatacctttgatccgtttattttcgtcagccatttggccgcgattgccgtttggtatatcggaggtcatccgggcgtgacatttctgatgctttatatcatccttgcaggatattacgccgtccggtttttgatgcagctgcggataaagcgaaggctgcgcgaaatgattgaagaggagattgaaaccatcattatttcgccgacgatgaaattcaggcagtggcgtatcgccgtgacgacggcccatgccttttatgtcggcagaagccttgacggccatgtcgtgatattggatacattcaaccgcgtgcccgttccggaaaccgatgtgatgaaggccgcgaaacaggacgaaaatattgcagcctttctttcattttcccccgtttacaggtgggaggtcgatacttttaaagatcattatgaggtgcgctttattgatttgcgctaccggagcaaaggccactatccttttgtcgccatcgtccacctcagtcatgatttagagcttctctcttcctacacgggctggattttcagcgaggaaaaactgcagaaaaaattaaagctcggctctgtttaagagccgggctttttttgtcttctcacatataatgcggcaaacacgaggctgatcaccgatagagcggccgcgggtttaaaaaacggcgggtaatacgttaattgaatatcgttttttcctttttgcgctttaaatccgataaaggaataatccgctttttcaatctgttcttttctgccgtttatcttcagctcccagcctttttcatatggaatcggaagcatgatatacggcgcgctggttttgttttcatacgagatatgaagcgtatttccgcgccatctgagatcggcccgcggttctttttccgcttttcggtatgcgtttttcagcgtatcgtaccgttcttcgtaaagcgccagcctgtcaagctgatacgatcctttcggcagacggatttggatgttttttgttttcggcactctgacagtaagatcgttgacacctgttttgtaaatggattgattcgattttctcgttgtcgtgtaatcgttcacttttaatgtaaagccctggtccttcgctttattcttcaaataaaagctgacgtaataatcgccgccgtccatcttagcggcttgcggcgtaatgatcaggccgccgccgtcttcatttaccgtcaggatgccgtcttgataatccgcatggtcggccgttacctttgcctgacggatcatatttttcgcctcaggcgcttttttcgtgttggctgcgcttgattccgtgatgatcccgtcaagcattgcccgttctctggcaagggagggcgcttttttcagaccgtcctcgttatatacgcgatcagctgtccgtacgaacggaagcatatattgattttgataaaccgcataatgggatgattccatgatttttttgaacccgtacggcacgccggccccgtttgttttttccgtcatataatattttccgtaaagcaggctgtataaattagccctgtttcctaatgtcgcataacggctgacgctttccctgcccatgtcaatccggaggtcgttccagtaaaaggacagcagattgcggttcagtatgcttgaatatacgctgaatccgttgaacccgtatatgatcggagtgttattgaaaacaccgttcatccaatccaaacgggcaaacggatcagggtctttttctttcaggcgctgaataagctctgtttgttctttgcccttatagtcaggacccgtcataaaggtatgcgataccgtataaatcttcccgccttctgataacgcatatttttcatatgtattagccgtcagcaccgccgtcaagagaatgacggcatagacggcggacaccgcgcctttcagtcttgtctttgctgcaaggaaagcggcaatggtcagccccagaaggagcaggataggcaggttggcctgatcagaaatatccaggctgaaccgtctcacttggctccaatagagcagaacggcgagtacggcggatatcagcatactcttcatgctgatgtctgaaagcttagaaagccctgctgcaaccgttccggcaatcgtgaagcacaggacgtattcaaacctgttttgcggagctgaaaaaccgttaaaggcgcttgccgcaaacggactgaagtgaaacagaatgtacagcagactgattcccgcaaacagccggaacagccggtttttatataaagaaaatgtaaatagaaaaagtaaaaaaaccgccggcagaatgattatccggcttgaaaataaaatgttgtcggaaaaatcaagccatgcaatttgctctgaatacggcggccgcagattatgaagatatccgtatacgacagggataaaggaaactgcgcttatgccgaacccgagaaggcccgacagaataaatatcctgcattgagcgagccttttcgcctcattgccttcaagggggatcatccacctgaataagatataaatgccgatgaaaatcagattaatatacgcaaaataaaagttgttgatcaatgtcagcgcacaggcgaagataaaccacgccggctttttttccctgatgattttttccgcgccgagcacgagcagcggcagccacaccatactgtcagtgaaaaagtcccaatacacctcatgccggaagtagataatcgagaccccgtacaacacggcgccggcaaaagcaggcaccgtccgtttgacgaaatagcggaacacacacgccgccgtgaatatgatgaaactctgcttggcgatgctgataaaaacggaggcctgcgcccaaaacagcgcatcagcctcacccgtcagctgaataagctgcaaaaagcggacagcggcggagataaacaggaatagaaaagaagtagagaaataatagccgagctgactgtacactcccccgcccagtccgaacgaatagctgtaaaacagcctgccgttcatatattgatcaaacagcagctttttgaagaccgccatttgggcgatcccgtctccagaccccgtcatatagcggccttccgaccactcttttaagaaaaaaatatgagcggctgccgcagccagcacacaggctgccggcaagatccatttattttttttcatacaacgtccccagaccctgcgcacagcggcggctgtttaatggttccacttgcgcttttttgtataattcgtttcattttgttctccgtacgttatattcgcttctttaattaaatagtgcgggcgtttttttgtttcatagtaaatccggccgatgtattctccgatgatgccgagactcaaaagctggatgccccctaaaaacagcacggcggaaataatggtgaagtatccgggtacggacacgccgtgtgtcagaatatgaacaaaggtcgttacaatataaaccatcgacagaagcaatatcagaataccggtgaaaaagcataccctgaggggcttgttgttgaaggagacgacaccgtccattccgtagttgaacagattgctgaatgaccatttggacgtgccgttcttcctttcgacattttcataaaatacgattttctggtcaaacccgatccagcagaacagccctttcgagaaacggttcccttcactcagcttcaaaagggcatcaacggcctgccggctcagcaggcggaaatctccgaccccgtcacgcaagtccacttcgacggctttgttgataaatttataatacagggaagaaagcacggaacgcacggggctgtccccttttcggttgcgctgcgcgatgacttggtcatacccttcttcatagccttgaatgaagtctttcagcagatgggtcggatgctgcagatcggcgtccatcacgattaccgcttcgccctgcacgtgttcaaatcctgccaaaatggccgcttctttcccgaagttgcgggaaaaagatatgtatttgacgcgatggtttctggcggccagttctttaatctgctgaagggtgtcatccgcgcttccgtcattgatgtagaaaatttcatagtcataatgaatcgtctgaaattctttttttaaagattcatggatgagcttgacgttgttcccttcattgtaagacggaataataattgagattaacctttgtttcatgaaggcaccttctttgtattattctttttttaggacggccttaaaggaattgtccgcaaaacttcagtaaggcttttcctttttttaatgacgtttaaaccctttttttgttacagggaaagaaatttttttctgcatatgatttatattttgtcatgtttttcggcagatatgagaaaaaaaagaaaaagtctgtacgcgggacagactttattgctgaaggtattcatgaatcaaatggctgacgatgcgcggtttttcgtgaatgacccaatgtgaggcatcatctatgaagattaagtcgccgtttggaatcatccgttttgtttccttggcgagctttttgctcagcgcgcggtcgttgacgccccatattaaccggtacggaacgggcattttaagcggaacggcagggcctaaaccgccggctctgatcgcccggtaccagttcagcatcgccgtgagcgctccttttctgccccatgcttctttgtagctgtcgacatcttcccgtgaaaaaagcgccgggcgttcagataagccgatcgcgtgatccaatacgcggtaatcgtcttcagacaatctccgttccggcttttccggaagctgaaagaaagcgatataagagcttttcttccactgcggcgggtagaacggtgtgaccttccgcataaccgccgggtgcgggatattgaccgtgatcaatttttcaacgttttgcggccgcgtggatgccaaatgccaggccacggctcctccccaatcatgtccgatgacgacggctttgtcatctgtaaaatgagtgatcagcccgataatgtcgtctctgagcgtatcaatggtatagttttcaatgccctccggtttgccactgagattatagccgcgctgatcaggcacgacaacatggtatccggcatccgccagcggtttgatctgactcttccagccgtaccagaattccggaaacccgtgcagcagcaccgccaaaggaccgtctttcggaccggctgaagccgtgtgcagcgtcactccgtttgtttcgatcatgtgaaacgtaatgtcattcatcgattctcctccccgtttgtttcaatcttctttctgttaagacgatgatcagtacgctgatcgcgatcaacaatacggcctgaacgatcagggcgaacggctgagtcagccggataagcaggctgcccgcaaatccagctgccgccgaaataaggccgaacagaatcatgaggagcgcactgaatcgattgccttctttccactgcgactcatccgccatagagcgcttcgtccgatatccgtacaggctgttgatcgacttcggcggaaaaaacgtgactgaaatgccggccgcagccatcagaaggccgccgattaccattatcatatccgtcactctccttttcatcttttacgaaaggaaaggcgaaaggtttcagaaaaaaagcaggcttattcgcccgcctgaatctttacttttgagttaagtcggccgtttttacataacctgctttcccggcgtatgtgacgtacgcccatttacggtcaaatcctccgtcatggctgaacccccagccgagcacattgacggtttcacccgctttaacagacccttttttgccggtttccaaagtcggcgtataaaaatcggtttgtttcgcggtcaccgccttcaccggctgcttcatcagaaaatgcgtggaaatataggctttgtgacctttgtagtcaatttcagcccaatctgctccttgaagccgtttaacctttacggaatcctctgaacgaagcgtgccgataatccgcccttgtttattgggttctttgcggacgttaagttctcctgctttcacgatatatgtatctgctgcggtgtctatttttgtctgatgaactgctgcggcattcgctgccggatcaaaaaaaacggtgcctgcggctaaaaataagcaaagtcctgcggccggaataaatgcggttaacccctttttcatgttcattgtggttcctccccgctattttataagttattacacatttccacattccgccggtcgtcaaacatgattttcccatttcttttataaaaagaaaaaaccgccggacggtatccggcgggcgcactgctatattaatgcaggagacccctgctttgatccaaataatgagaaacgtcttcccgaacgctttggaacatatggagcttgctgccgtatgattcgatccattccttgacgacgcgttccgtcatttgctctccttggtacgggcggccggcttttgcgtaagtcgcttcgaaatctccccataaaagctcaacccaagtccgcgcttgcaaatagctgagcatgtcatttttctcaagcagcaaattcgtcagtttgtcgatatatgtattcatgtctctgtctcctttccttgggaaaacctgctgcttttacgcagcttgtcacaggcatatactaactttacgtcttcagtccagaaggcgcaaccttttgatattggccgagggggaaaacaaatggtccggaacaaggcaaaaggatttcctaatcagaacaataataagtttgaaggcgaaccgcgggcaaaggatgactacgcttctaaacgggcggacggttcaattaattcgcacccgcaagagcgcatgagagcttcaggcagacgataacacacaccgtaagagaccgggaatgacccggtcttttttttgcggaaaaaaacatcctcttgcggtcataacgctaaataaattccataatatgttaaatgctaaaccgcaagccggtagacaaaaaaggaggggttttataaaatgaagacagtttcaaaacgattgctgagccttaccgcattcttactgtcagtttcattatttgctgtttcagcagaagcagcgggcagcccgcagacatctgtatcaaacagcggtgaggagtttgacgcaaatcagaatcagcctgtacaaacaacacagacatcccccgcttatgaaggaacgggcctcaccaaaagacagcttgcacaaaacagcaaagctgacatcaagtcattaaagccttccagtattattgggacagacgaacgaatcagaatttctcccacaacatcatttccatatcgcgcgacagcacagctgaccgttacatacagcggcagcacaagcacctacggatgcaccggtttttttgtcaatgctgacacgatcgttacggcgggacattgcgtgtatgatcagaaaaacggctgggcatcgaaaattacggcagctcccggccgcaacgggtcatcgtacccgtacgactcttattcaggcaagacattctacagtgtcaaagggtggacagaaaacggtgacacaaactatgactacggcgcaatcaaagtaaacgggtcgcccgggaatactgtcggctggtacggctatcggacgaccaacagttccagtccggccgggctttcctcaaccgtgacagggtatccgtgcgacaaagtgtccggttccatgtggtcggacagcaagccgatacgttctgccgagacatataaactcacttacacgacagatacgttcggctgccagagcggatcgcccgtttaccgcaattacagcgacaccggccagaccgccattgccattcatacaaacggcgggtcgtcttacaatctgggaacaagggtgacaaacagtgtattcgacaacattcaatattggtcaaatcaataaagcttttgtcttctttctcgcggcagccgttttatgcggatgcggcaaagcggatgattccgccgccaaaaaagcactgcccgttacgctccatgttgagaatgcagacggttcaccggcggccggtgtgacggttaccgtgatgaaagcggcggagtcagatcatcagccgaatatagaccgcggagagataataggcaagactgatcaccacggtgagatgacatggaaaagcggcgcgaaaggaacctatgccgttgtttttgaaaaagacggggtaccggaaacccggaatatttccttagctgagagcgataaacatacggtgatcagcattacgttgaaacattgaaaaaagcttgcaggcggaatatcccctgcaagctttttgttatcctttatgcacttggtattcataaacatctttcttctcagacagatgagcgaacgtggaaagcacaaggccgagagccgtcatcagcgcaccgccggcaaacagccatgagtaagatcccgttcccccgagaatcaatccgccgatccaggcgccgagcgcgtttgccaggttaaaggcggaaacgctcaccgcagcggcgattgtcgtgccgttttcagaggaggaaataaccttggtctgcaaaagcggcggcgtgccgaacgcacatgcgccgaacaaaaatgtcgctgaaacggctgcggcgggaaaaacagcgatataaggaaaaatcgccaagacgccgatcaggccgatcatcacaccgatcatcgtgcgcgtcagcagtttgagcggcactttccccgcgaagaaattccccgccactccgccgagaccgtaggcaaataatgcgcctgtaatgccgactgtgccgaaccccgctgaatctcttaaaatcggctcaataaacgtgtaagcgataaagacgcctgagtagccgagaatggtgatcgcaaaggaaaaaatcacttgtttatgcttaaagacactccattcattcatcagcatcggaatcactttcggttttcggttcggtacgaccagcatcagtccgatcagcccgatcaggcctaaaacagaaataatgaaaaagacggcccgccagttaagggcatcccctaaataagagccgaacggaacgccgagcatcagcgccacggttaatccgccgttcatggaagccgcggcggcggaacgtttttcaggcggcaccatttcacttgcaaacaccatggcgatcgcaaaaaaagctccgtgaatggatgcggataaaattctggaaatcgccagcacggcgaagttcggcgcaaagacgctcatcaggttggcaagcacgaagatgcccatcaaccctagcagcaccggctttctcggcagcttaaccgcgataatagttacgatcgggcccgtcaggcagacgcttgccgcgtacgccgtaacaagcatgcccgctgaagatacatgtatatgaaagtcatcggcaatcgacgtcagaatacccataacagcatattccgtatacccgatggaaaatgtgcaaatcattaaaacaaaaatcattaatttcacagatggctgtttcattttgatattcaacgcaaatcgcctcctttttattaaaaaacaacgaattccatcttaaaagatatcaaaaatgaattcaatcattttttactgaaaggttgaaacgaatgtgcccgaaaagaaaaagaggccggaaccggcctcttttgttattatttttcttttaaaacggaaatcggcagtgcttcttccccgtcagacggggaagatctgtgtccccaggcgaatacgccgttgatgtaatcaatgcggaaagtgtcatcagaaccttctatctgatacaccccgccgggccgaaagtcttccgggttcagcatgtaagctttggccatcgtaattttccgttcaagcacggccagttcatttacaatgcccatctgttccgctttacgcgctttttccgtcagtcccgcaatttctgtctgtagttcatgaggcgtcatttgactgtatcgtttgtccatttcagtttactcctcttcctgcaagaattgatcaatatcgtcaatcgagaatccttttctgaataagtactgtttgaccttcattccgctttcatagctgccgtcatagcggtatttcctgatcgctttttccgcatgagccttcagagcttccatctcggcttcatcatcattttcatactccgtctgctccagagcggcattgatgacgtcgaaagggaaaccttttcgctgaagctgcatctgcgcccgctgtctgatctcttttgtggacagctttttgtcttttttgaggattttgccgatatgtttcagcgcttcttgtatctgctcatcaaatgtaaacgcgctgagcgtctccttgatggtatcgtcgtctattcctttcgctttcagctcgcggaacaggacgtcagggcctttgccgtttgtttttttgtgggtgctcgcataggcttcggcaaattctttgtcatttaagtagcggtaatcgtacagtttatggatgacttcagaaatgaccatgtccggtgtttcttttttcttcaggtgatcccggacttctttttcagaccgcatccgatatgataaaaattcaacggcgcggttaaaggcttttttcacgtcatcaccgtgctggatttcaagaatgtcaagctcgtccagttctttcccttttttcaggtcaaaacgcacaagcacgtcggcgtcgacgctgaatgcatatttctcatcaagaaagatgttgaagcgctcggtatttttcttttgggtcgatatttttgtaataaacggcatcccggtctccttccccgccccgatgttcaggcgtttttctttttggcaaatgaggtacagtatatgtatcaacgtgtaaggagagatggatatgaatatcgcgatgacaggcggcactggttttctgggccggcatctgacaggtgtgtttacccgccggggacatcatgtctatattttatcaagaaaacagagagaaaccgaacaaaaaaatgtgacatatgttcaatggctggccgaaaacgcggcgcctgagcgcgagcttccccctattgatgtatgggtgaacctcgccggcaaatccatctttgaccgctggacggacacaacgaaggaacaaatcatttcaagcagaatagaagcgacgagagaagtcagacggattatgaagcagcagccgaaaaaaccccgggctttgattcaggcaagcgccgtcggcatttacggcacaagcacagagaaaacgttcactgagcagtccgatacgtcaaatgaagactttctcagtcatacggctcatatgtgggagcgtgaaggccagaaaattgaagcgctcggcatccggacggtatatgccagattcggcgtgatgctcggtgaaaaaggcgccctgccgctcatggttctcccttataagctgttagcgggcggcaccgtcggctctggacggcagtggctgtcatgggttcatgtcgatgacgccgcggaacttattgcttttgcggcggagcatgatgacttgtccggtcccatgaatgtgacatcgccgaatcccgtagaaatgaagcaattcggaaagacgatcgcaagcgtcctgcaccgcccccattggattcccgtaccggaattttttctggagaaggccttgggagaaatgagcctgctgatcgtaaaaggccagcgcgccctgcctaagcaggcgctgacatccggttttcagtttacgtatgaagaacttgagttggctttaaaggatatcttatctgcataaaaacggaaataaaagccaatcctattggtattctgttttgaaggagggtcttcttttatggaaaagaagcgcgaaaaacatcagcagggagccaatctgaaaaaaatgcaggaagtcctttattccggtgaatttaaaaaagcggaaagagcagccaaacggaaataaactgaataaagatcggggccgggcagatactatgtttgtttgatatcacttttttcagggggcgattgatatgggcagaaatcatactcacaaaaaccgtgataaaaacaaacaaaaacttcctcaagttccggatgctttgaaacgcgaaacagacggcacgtacgaggaatattcaagcgagcttgctgattccgctgaccgcgaagcgcaggcgcggatgaaagccgctgacaacagagctaaaagcaaaacccgctaatacgaaatccccgcctctgtatagagacggggatttttttacaactcggtaaacaggctttttgccggcgtccgttctttcgccttaggctgttcatccggatagcccgtttgaatgatggcggcgaagcgctcattgtctgccagaccgaagtcttggtgcacctgtttgtcatacatgatgcggccgcttttccagaccatgccgatgccgttttcatgtgcgagcagctgaaggttttgaatcatgccgctcagcgccgcgaaatcatcgtttctcgtaaattcattttcatcttcttttaagacgacaagcaaaaatcccggaacggcgctgaggttttttctcatgttccgctctttttcctcgttgaaatcatcttttatttttttgaaaaatgagacgtagctgtccgcaagcttttctttacccgcttcgcttgctgcgtagataaaacgccatggctccgtcagtctgtggttcggcgcgtaaacggccgtttcaagcatatctaatatgacttcagaaggtacggtttccggcttaaacgaccggatggatcttctgtttctgattgtatgtgcaagactttcgttttgctgtagttgttcggttttcggcatgccgattcaccttcctattcaattgaaaatgattatcatttataatataacggatacgaccgtcttttgtaaaccgttacggaagctgaaaattgattgattcggcatacacggccgttcccgtcatctcgattttcatcttttcgttatcttctgtaatcctgatttccacttttccgtctttcccgatttcctggccttgttcaatcgtgaggcattcggcttcagagcctccgtattgccgcatataggccgccataacgcctgaagcggttcccgtgacgggatcttcggtcgttccggagaaaggggaagaaaaatggcgtccgtgcagatcactttccggatgaacggtttccagagaaaacggatgaacgctcgctttcggaagatcgcgcaaaacagcggggaattgtgcgttgtccggcaccatattccgtgatgcttgaagtgatctcagcggaacaatcagtgtccagatccccgttgatccgtaaacaatcggcagctcgctgtgaaaatcctcagccgtaatcccgagcgaggccgcaagcttttctttgtctcccgtaaacggcagaaattgcgggggtgcctgttcgagcgtgatgtatacccggccgtttcgttcagcggcttttgcgggaagaataccggcttttgtctcaatttgatatgtctgatcagcctgaagccttcccttttcaattaatgcgtaaagagaggcgacggtagcatgtccgcataaattcatttcgtggccgggtgtaaaatagcggatgcgcagatcggcttctccgcttttgcagagaaatgaggtttcattgtaccctgccatttcggcgatcatctgcatctcttcatctgaataatcatctccgttaaagacgattcccgcgggatttcccaaaacaggaatatcggtaaacgcttcatatttaaacacggttgcctgtttcattcatcagccttcctttcaccttatgatcatgttattcagtataacagagtaaaattagaatttttagttaattcttcaaaaaaaaagacgccttttaacggcgtctttttttggtttttccgatcaggcgggtgacgagaatcatcgtgacggacagcgatctgtttttacggtacgccaagtatttcccgcgccactccggtttgtatttttctttaaaggcccgcagcccgctgaagctgtacatataccggacgttgttgaaaatgacggccgcgattctttccgaccagaaagatgtaaaagccgttcctacgtttgacaaaggcgccatgcccatattaaaggtggtatagcctttttcctgcgcccagagaaacagacggataaaaagcgcgtccataataccgttcggcgcacttttccgataacgcatcaagtcgactgatatctcgccttcctgatacatcggcatcaggttggcaaaagcgatgatctccccttccgcgtctttcacgtaagcaatcggcgcctgttccagataatcccggtcgaagaaaccgagagaaaaacctttctcttttttcggtccgagccattcgtccgatatgtctttcagcttggcgataaactcggaggaaaacggcggttccccgacatgaaatgtgtagccttcgcggtcaaatttgttgttaatcgcccgcagccccgcttttttcttacctgacagcgtaaatgcttccatatccacgaacgcctcttctccgagcttgaagaagttatagccgaagtcatggtacagcgccagatcttcacgttcgatctgataaaacatgacactcagcccctgcttatgcgcttcattcagaaattcctcaatcacaagcggaaaagagtctctctgtcctgacggatcaccgagcacgacaagccttctggaaatctggccgaacaataaaagcgctttgccgtcgcttgagaaataaaaccgcttatccccgagaaagccgagatggctgagggcgtttccgccttcttccgccaaaaaggacttcagccgttcagggtcggccttttctccgatcggcttcgatcttttatgataaaagaccgtaaacaacaggaaaaacagcggcacaacaataatggccgtcatcgtggcatatgtaatgtgcgaattgttatgaacgaaataatcgtggcgcagcagccgattcattttatcccagataaagccggcaatgagattgtagttaaacaaggcgataataaacagagcggccgcaaaaatcatctggccgagcgtatacgatgcctgctctctgataaactgccgctttaacagcaccagcaatacgatgacgacaggcagaataaagatcgcgctgatgttcaatccttttaaaaaactgaacacaaaaccgccgaccagcgcggcaaccgccattgaataagaacgtttcgtccgtttgtataattcaatcggcaagattaaaagaatcaaagccgcgcttaacgataacgcgttaaacgcaaggagcgccgggcgcggaatatgcgggatgaccgtctccctgtcaatcggcagggcgacggatgccagcacaacgactcccgccatgaaaactaaaagcgacagcgaaccgtaaagcactctgattaagatggcgcgctggaatacgagaagcacgttcgtcgtttccacggcgggcgccatcttcggatttgattccagccgtttaagcgtattttccgttaaatcgccggccgcaaagaacagcccgaacacaaacggaataaatgaatacacaatccggtagatgacgatggatgtcacaaccgcctcctgcggaaagcccatattctgcataccgagcagaaacagaaggtcaaacgaaccgaatcctcccggcacaaggctgatgattcccccgatagcggcaatggcaaatacaccgaatacatggcggacatccgcgtgaatccccatgacatacagggaataatacatgacgacggccgccgcaaaccattcggcaaacgatgccccgatgtaagaaaaaaccggatgcctcggttttgcttcaccgtcttctgcgcgagcttttttattgttgacccaagcggcgattaaggctgccggcacaataagcgccactccggcgattacagcccacagccacggtttctcacctgtaatctctccgaccggcagaatgcgggcaatggtcaggatactgaagacggacagcccgagcagcgctgaggacgtaagccaggcgatgcctgcgacaaggcgttttacgtcattcgtatgctctttgtaaagcatcgtccgcagcccgacgcccgccagaccgccgaatccaaggacattgttaaaggaattggcgataaaggagaccctgaatactttccaattcggaatgtcgaggcgaagcgtccgtttcagcacaaagtcataaaaggacatcgcgctgacggcaaggagaccgagcagaacgagaataaataaatcgtaacgctcaatcccgttaataatatacagcgttcgtttaaaagaaaggtctgtcaattcctttttggactgataaatgactaaaagcaaaactgcaataggaaataatacttttaatatcgataaggcattctttttagtcagcaatgttctctccaatcatcataaaatagcttatttattataattcccccaataatctccaacatattatacactaccacctcacattcaaacaaaactcgtctgcaactttctttctctgattaaaatcagtaatatggtatgcaggagtatgaatgaggaagtgagacgatggattataatctgcatgatacaacggtattaggcggcgatattttttctcctgaggaacgggatatttgggtgctgtacatgaaagtgatgacctcggcgggactcggcgatgtgtcggagtggatgaagcttgatatgagcatgccgcaaatgaaggtgctgatgcttctgaacaaccacgggacgcttaaggtgagtgacatagcggagaaaatgggcgcttctctttcaaatacgacggggctccttgaccgtttagaaaaatcatgtttcattacacgcgctccgtcagaagaagaccgccgttcagtcgtcgttcaattaacggaaaacgcgaaagatattttccgcagcctttatcaaaaaggacatgtaaaattgaagcgttcattggaaacgctgaccgctgaagaaaaacaaacggtcaatcaaggacttgccatcttggcaagagcccttgattcttccaaacaggcatagagatgaaaaaggcctgccggtatcggcggcctttttttgtttgacatttaattcacttgaagtgaataatatattcgaagtgaattaaaaaaggaaggattgatcagtatgccggatccattgcaaacagaaaaaaaccagagccgggccatcactctttttacgatcggtgtgttcatggcggcgctggacaacggaattatttccgctgctctgacgacgattaacagctcttttgatgtttctccttcatggggatcatggggagtgaccctttacacattgggactcagtgtcagtgtgccgattgtcggcaagctgtcggaccgatacgggcggaaaaaactgtttatgatggaagtcggcctgttcggactcggctctttgcttgtcgcactcagtcagagcttcccgatgtttttggcggcacggctcattcaggcgcttggcggcggcggaatttttataatcgggagttcgcatgtgctggccgtgcttccgaaggagaaacaggggaaagctctcgggcttttaggggcgatgaacggtatggcggccgtcctcggaccgaatatcgggagctttttgcttgatgtaaccggatcgtggcattggctgttcttgattaacctgccgattgccgccgctttggttgtgtgcggcggtttgtttatcgctgaaacgaaagagcctgaggcgaaacggcttgatctcgccggcacaatgctgctgtctcttgcgatcttatcttgtatgatcggtatcacgaatctcgatgggacgaagctgtcagaaagcataatggacgtaaaggtgtatgggtatcttttgggagcggcacttctctttctggtgctgcttaaggtcgaaaagcgggttgaataccgcgggggcgatccgattctcgcctactcgctgctgcaaaataaagtgtttcaatggacgcttgtcatcggatttttatcgggagggctgctcgctgcggtcatttttattccttcttatgcggagcaatatttacacgtatcggcggagaaagcgggttattggatgacgccgcttgcgttggcgtcaggcatcggagcgtggctcggcggggcggtcacggataaaaaaggaccggtcttctccgcggttgtatcaggcgccatcgcctttgcgggcttcagcctgtttccgttatgggtgacggataaatgggaatttgtcacggcgagtgtcattgcggggatcggtttcggatttctgctcggggctccgctgaatgtgcttgtatcagaaacggcgggccaaaacaaaggaacagcgctcggcacgctgtcactcgtaagacaggtcgggctgacgctcgctccggctttatatgccggcttcattacagcgggctttgaccggatcggagaggacattaaaaaccgtttaacgaaaagcggcattcccgctgatcaggcgcaaacgcccgatatcggcggcggactttcttcgttgcaggagcaggtaagccgaatccccgttcccgccgtcaaaaaagcggtttctgatgcgattgaagcgggcatttccagcggctaccaccatctttatacggcagccgccgtcatttcattatgcacgattgtgtctgcggctgttttggcgtttttccggaagccggcatcctctaagacagatgccagcccatccgccgggaaagctcagtaatatgggcgatgtgatgttcagagtgccagacatatagcccgagcgcctgttccagcgtaaccgtctctttagatacaggatggaagtatgtccgtttgaattgggcttccgtcatggagcgcaaaagagcggcccatcttctgtgcaggatcgttaacagctcaagcgcatccccgcaagcggcggttttggaatcatgaagagcggcccagcctttttcatcataggacggatttccggttcattctccgttaagctcaatttaaaccgggtatagccgttcatgtggctgtccgccagatggtgaaccacttggcggacagtccatcccccttcgcggtacggcgtatcaagctgactggccgacatcgctctgacagcttggttcagtttagccggagcgtgttccagcgcattgatccattcttgtttctgtccggccgaaatcgattcagccggctgatactctccaatcggatggctgagggtttgtttttccatttttgtctctctcccgctgctcgtattatgaaagtatgatggtgatgtcgcagccttccgctttcgcttcacgaaagacctcaagcacactctcggcgccattttctgtaagctgcttgctttgttcaaactgtctccattctaaaacaagggggtactccacccatccggtcagacagtcccataaagcgtcaaggttttcaccgtagtactcaggaagggcaagttcctttttcaatgtctggtgcaggtcgctcatacttctgatttgctccccgttaataactgctttattcatgcgcggctcctttctcatgattctattctatcagtttaccattttcctcttcagaagtgaccggagtctgccgcggttccagctggacgatgccttgcccgccgtcaacggccaccctgtcccccgttttcagttttgacgttgcatttccgcacccgacaacggcaggaatccccagttcccgggcgacgatcgccgcgtgggacaaaggggcgccgacgtccgttatgatggcagccgctcttggaaaaagcggggtccagcctacattggttgtcgacgtcactaaaatttcccccgccgcaaaagaatcaccgtcttccggagcatcaaggacacggacaatgccctccactctcccggccgctcccgcgaaaccttttaaagtatgcgcatcatccgtttccgcaggcataaaagcatcgtaataatccgctcttctgtcaggatcctcagcccatttaaacggattgaatcttccgttaataacggatggaaacggcggcagttttttataggtttcatagttttgctttctcgcttgaatcgacgcaaccgccggctctttccccgcgagcagatcggttatttcatgcagatacaggaagaaaatatcgtccttcatgccggtcatttccgccgctctgagcgcgaatgctctggctgtccggtacactctgacaaattcggatctggttgtttctctaatattcgcgtattctgacgctttttccattttggctttgagccatttgaccttatgaggaaactttttttcaaatcttcggaaggcctgttcatgcgcccgctgctgtttcaaaagcagttgttcggcatcaatacccgactccttgtgttctttgatctgcttcgtcagccaatcccggttttctcccggatgcggtatggaaagttcgtattcatgcgggccacggtggccctggttcctgagatattcttcctcgctcatacggcctttcatgacttgatcaatgccgataatcggctccaggctggccagtccgccttttcccctcagattggaaagcaggagattcgcatcttctatgcctgcgagttttgttaattgagaggttaacgacgaagaggattgcgcagaatcacgcccgccggatattaacgcaaaccacgcgttgcataaatacggatagatctcatcgttccatatcgctaataatgcctgctccgtttcggcgcgtttcagcttttcctcaatattccggcaccactccggtgattcgtccaagtaggaggacatgttttttttcgcttgcttcattttcgacagatacggtttcagttttttcgggatgatcttcaataattcatactttgagaacggatataaaggtatcttcatttccgccgggatttctcccaatgtatcgctcatcatttttccaatttttccgcctttcggattcagaccgaaagcggcgagaacggaaagaggctggctcatattgttataggctctgccgcaaatattgccggaccagacataatagcccggaatgatgcccgactcttcatccagattccggaggagcgaccatgtcagcggcgtcatcacatcgggaatcgcttctcctatatttgtgtttgtccataaaaaatcaccgctgaaagaatcgttccattcataggtttccagatttccggcttgtaaggtcgtaatcgggcgggattgaagaatatacaatgtcccgcccgcggcggcccattcaatatcctgcggccctccaagatctttttccagctttttcgccagtttatagagctttgacgcatatttgcgaaattccccggggccgtcatattttttcttgggccgtgccagtttaaaagaataggcatcggcttccccggaaacgagctgctccccgagaccgtagacgtaattgcctgtcatctcccgcctgctccccgtaatcggatctgcggtaaacagcactccggatatctcagacggtatcatcagctggatgacgattgcgatttcatgctcatcttccattccctgaacggcgctgtacgcttttactctttctgactgtaccgaccggcggacttcatcaatcgccctggacatgtcttgatctgttctgacattcaacaccgtatcgaattctccggcaaaggaagcctgagcggaatcctcgctcagcgcggatgagcgtacggcaaacaacgcagatgcatggcggctgcggatggaattcacatattgatcaacagcctctctcgcctgatggcggagctgtccgtcctgaaaggctgacggcaaaatcacaaacccttcaggcacaggatacccgctttgatacattttagagagaatgcttccttttcctcccgcaaaggaataaagttcggccggaagttctccgaatgttttgacacagtcattcataatgtccccgctcctttttagtcgttcatccaagctcacagtttttctctttttcactttttttgaaagtatttcctataagtatacaatatatcggtcttcacaagggagaaaatcggtggcgttattttgtcataaatgcatccgtcaaaacagccgcaggcgggggctttgtatgcaggatgtacaactatccgtcctcgtgccggataaagcggacccgtatcaaaaaggcggccgaagcgccgcctttttttcagactgtgcggccttgatgcgccgccgtatttcttttggtctgcttcggctgatacactttcccgacaaacaggtatccgtatctgaaatggttgcacccccacgatacgaaaatgggacctagcgtgcagatcaaaaataaaagaaggatggcagccgctaaaggcattgaccgcaaatagccttccagaagatatccgctgattaaaaagtaggagtgcagcagatagattgaaaacgaatagttgctgatcatcatcacaatcgcgggcacttttttgagctttgaaaacagatgaaaacacagaaagatcatactgaccgcgtaaatcataatatccggacgcttagaggaaatggagccgccgctgatatatgaaacggccacaatcaatattgccgatacggccgcactgaagtaaaccgcataacggtactgattgatgagcgataaaaaacgcggatattcctttccgcaataaaatgccagacagaaataaaacacccagcccggaaacggaacccaaaagaacggaaaaatagaatcaagccccgatgatgccggcggatgaaagatggaaaagtaagccagatagacggcgttgatgataaacgaaacagacagcacccacacgggggatgtgttgttcagccagcggtgcagcagcatatggagaatgtaaaattgaaagatcacaagaatgaagtagccgatgaagtttcctaaaaacacattttctaaaaatttaccgatcactgaaacgaatccggctccttcttccgccacgcttttcattaaaatggcatccaccgcggcaataaacagaaacggcacgaaaatgactttgccccttttctttaaaaaacccgctggaacgcctttcgggtatgacctggcaagcagaaattccgaaataaagataaacgccggcgtgctgaacatcaagagggtccgaaacgcatcaaccgtatgggcggcactggctaaggactcttcctgaatcatcagcaccattgaaactgcgtgaagcagaacgacacttaaacaggacaggcagcgaatcacgaaaatttcttttatctgcatgcggccgctcctttttcacaagcgcgccggactttggcgtatgcttggcgcagccatttttcccgcagttcgggtgtgctcgttctgacgacagaaaaaaggttccgctcggctttttgaatgccgcaaaattgcagaatgctttttttcagcgtaatccagtccgagtttttccggaaccactttaagtaccagcccggggagtccgccgtataaaagacctgtgccgtctctgcccggagcagtccttttacgcggccgttttcatatgtgtaggcttctccggcgacaagcactctgtcaaaaaagcctttcataatcgccggaacgcctccccaccacagcgggtagatgaaaatgagatgatccgcttctttcatcagtttccggtatttcttcgtttcagcgtcccggttcatgtcagagcgctttttttcgccgccgtacttcagcacgggatcaaattgatcggcgtataagtcaatgaccgtatagctttggccgctgtcctttaaagccatggcgacgtattttacgagagccgcattgaaactgttctcatccgggtttgcatacacaatcaccgtcttcatatgtccctcccagtatttattaatttttacaatgattatatcatgatgtcatatgaatgaggcaaagacacgagaaaggctttttccagttctgctgccgtttcgataacccctttctgcatatttttgctgattttggcgccgcggattcaatgataagcatccggtgcttctgcgtttttgagcggccgtatggtatactagctgtcaaatgaatgggcttggaggacaacatgagaattttaaagtacgcgattttagggcttttgcgaaaaggcgaattgagcggatatgatatatcgagctattttaaggaagagctcggccagttttggagcgcaaagcacagccagatttatccggaattaaaaaaactgacggctgagggatttattacgtttcgcactgcgattcaaggaacgaagcttgagaaaaaaatgtacacgctgactgacaagggagagctggagcttgctgcctggctgacgaaaaaagacccgattccggaaacggtgaaggatgaatttatgctgaaggcttatttcatctcagctttgacgcaggaagaagcggatgagctattcaccgatcagctcgtaaagcggcaggagaaattgtccgatctggaaaacagttatcaagaactgatgacatcgtccgcggaggcggattcattttcttctcctgatttcggccattatctcgtgctgacaaaagcgcttgagcgggaacggaattatatttcctggcttgaagatattttggctctcatcaaaaaagcataaacaaaacggggcggctctgtatctgcaggccgcctgtttacgttctgaggaccgcattgataaacgaatcagccattaaaataagaaaaagcagactgaaataaacaatcgaataaaaaaacatccccttcgaccattgcgtgtcatccgccgcctgaaagcctttgacgctccggtacagccagatggccccgagcaggagagcggacgcggtataaaacgggctgacgtctatataaagaggaacgagcagcgaaaccgcagtcaaaacggcgatatagcgcagcatttttatttttgtgacgcgattgccttttatgatcggcaaaagcggaatgccggcggcacgatactcttcctttcgcctgattccgatcgcccagaaatgcggcggctgccacaaaaacataatcgcgtataacaaaatcgcgggcatatcaatgtacccggccagcgcgcaataaccgattaaaggcggagccgcccccggaaagctgccgacaaatgtgctccagacggattgtcttttaaaccaaagcgtataaacgacggcatacagcaaaaatgcaagcaggccaagaacggcggtcagtacattaagcgaagcaagcatgatgaatccgcatacgccgagacatgtgccgtacaggaccatgaccgtcggcggtattcttcccgtgacgctggcgcgggtgcgggttcgctccatctttgcgtccatgccgcggtcaaagaagttattaaaaacagtgcttgacgccatgactaacgccgtgccgatcatggcagccgccatggcggcaaatataccgggccctccgtccgtcctttccgactgaagccacgcgatccaaaatccgcctaatgcggcgagtgaatttgagatgataatccccggtttggcaagaatgataaagtccttgaacgtcatccggtttccgttatgcttcatagactgttccgtctgtgctgcatttgaattcatttgtggaggttctcctttttcggcttatcatatcaggaagaatcaggaagtacaatttattttgggcatttttcacacaattgtaaattgtatatgaaaagccgcatcttgtgaccggatgcggctcttccctttttctattcaaagtctgcccatacagctccctgatccgccgaacggacacccattttcaatccagcggatgccctgagttcgggccggcgatggcgggctccacgcgtcatgtttgcgcctcactgagatgttcgctctcttcagtcacacaaaagccgggtgtatattgcaaatcgacgttcttctttcccgagcctttagaaaaataaaaacccttgccggttagacggcaagggttgtttcttacagtgtaaatgcgatatccgcccctgatacagggtctttgacgaatacgccctcttctctttcttcgatctcaaagccggcatcggtcagcgcttttgtcacacgtgacagctctttttgatgcggcagcgtgatggtgtaataatccagcccgcttgcatttcccggtttcggcggcgcatgttttccggcccatatattcagaccgatgtgatggtgataccctcccgccgaaacaaacagagcggacatgcccgcgtaattgccgacaatgtcaaaaccgaggatatcggtgtaaaacgctttggcttcctgtaaatccgtcacatgaagatggatgtggccgataacggttccttccgggagacggcttttccgttcagctccggcttcttccaaaagcccgtccacatcgacgggcgccgtttgcatgacgtaattgccctctgcatcccggcgccacgtgctgcggggacgatcggcgtatatttcaatgccgttgccgtccggatcagacaagtaaagagcctcactgactgcgtgatccccctgcccgagcgcgatgccgttttcaatcagcctggccaatgcgatgccgagttctttccggtcaggcagaagtatcgcgaaatggtaaaggccggtgacagaccgctccgggagaacgacggcgctcggattttcttcaagcaccagcaggacgcgttttccgtctgctgacagttctgcagaacgatctgtctgcgagatgacttgaaggccgatgacattccgataaaagccgagcgagcgttccatatttttaatcgtcaatttgacataaccgattgctgtatcttgatgaatgccggtcatttgaacgccttctttcttatgctgaaaaagtttctcccttttttgatttgaaaaggagctgatccaatgaaagcagacggcttcctgaaagcgctaagtgaattgacgcaaccagtaagatgaaatcaaattccgatccgcccataaatggtgaggaaagcttcgccgtgaagatggcgccgactaatgtgacggcaaacagaacgccgataatgcgcgtcgccaaaccgaaaaagatcagtaccccgccgacaagctcaatcgtcgcgatgacgtagaccataaaggccggaagcccgatgctctggaaaaattgcgtagttccttccaacccttgaaacttggataaaccgtgaacaaaaaagataatacctgttacaacccttaaaagcagtgttcctgtttcgaatgatttattcataaaatcctccttgaaaattattatcacttactttatgtaagctagtatatatacataacttatttacgtcaagtaattttgttacatttaacgaaaataacttaaaagtactatttgtcttcgcaaaaaaaagacctccgcactctgtcggaggtctttttccctacctatgattcccggaactggctctcatataattcccggtaaaacccgttctggctgagaagttcggcatgggttcctttttcagccatttcgccgtctttcagcacaagaatctgatcggctttttgaatcgtgttcagcctgtgagcgatgatgacgcttgttctgcccgccattaaacggccgagcgcttcttgtattttcacttccgtcaccgtatcaatgttgctcgtcgcttcatccaaaatgagcagcaccggatccgccagcacatctctcgcgatggaaataagctgtttttgtccttggctgatgcccgcgccgttttgggtaaggacggtatcgtagcctttcgggagccgttcgatgaatccgtgggcattggcggcttttgcggctgcctccacctcttgatcagatgcatccagacggccgtaacggatattttccctgatggtgccctgaaagagaaaggaatcctgcaggacaaaccccatgttttttctcagactggacctcgtcagttttttgatgtccgttccgtcaatgaggatttttccgttattgggctcgtaaaaacgggcgatcaggctcgtaacggttgttttacccgctccggtcggtccgacgaaggcgattgactgtcctttcggaacgctgaaggacagatgttttaagatcgggctgtcttcctgatagccgaaggagacatctcggaattcaatctctcccgttttgatcggctggtgcgtcgcatgctcttcatcttcccgctcctctttttcatccagcacgtcaaacacccgctcagccccggcgatggccgataacatcgtattgaactggttcgccaaatcatttaaagggcgcgtgaactgccgcgagtattctgcgaatacgacaatggaaccgatcgaaatccaccccttcagcgcaaacagcccgccgaccgccgctataatcgtaaagcttaaattgtttaaagagttcatgactttcggaatgaatcccgaaattgtctgcgcccaaaagcctgatgattgtaacgccgcgtttttttctaaaaattgctccatgacgcggtcttccctcgaataggctttaatgaccttcgctcctgatatcgactcttcaataaaaccgttcagctcgccgaggtttttctgctgctgcttaaacaggagtcccgtccggttggtgatccatttaatgctcaaaagcatgatcggaataatcaaaagcgtgatcaatgttaaaagcgggctcatgaacagcatgacggcgattgtgccgacgaatgtaatgacgctcgacagcacttgaatgacggatgtatttaaagtggagctgacattttcgatatcattggtaacccggctcatcaaatcgccgaggcgctgtttatcaaaaaacggtatcggcagctcatgcagatgggtgaacagctcgctccgcattttaaacacggtgctttgcgagatattgatcatccaatagttttgaaaccataaggacaatgattgcacgaggtaaatcccaaacagtatgaacagtacacccgccaatccgtccgtcgtccgtccgacgataaaatgatcaattgctttcccgatgacgaacggtccgagcaggccgaatatggcgcttatgactaccatgatgatcacaagggttaaaagcccttttttctcggctacatacgaccagattctgcgcagcgtgccttttgtatcttttgctttcgcgcgttttctgccgccttcatttgatttgagcggtattttcggatatcggaaaggtttacgaatgtctttctccactgtcagctccctcctttccgaattgtgattcataaatctgccggtacagatgagactgtgccatcagctctttgtgcgtgccttttgccagcaattcgccgtcttcaagcaataagatggtgtcagccttcatcgcggtggttattttctgcgtaataatcagtgtcgtgcattcataggatctgatcgcttgtaaaagcttcgcttccgtttgaagatcgagcgcgctcgtactgtcatctaacagcaggagggacggctttctgataaaagcgcgcgcgatggaaatccgctgcttctgcccgcctgacaaattgacgccccgctgtcccagcaccgtgtcgtacccgtttgacagcttcataatcgtgtcatggatttgcgcgtctttggccgcttccattacttcatctagtgaagcttcctcccgtccccaggcgatattttcacggattgtgcccgaaaacagaagcacttcctgcggcacatagccgatttccctgcgcagcccgcaagcggagaattcaccgatcggtttgccgtctatgaaaatactgcctgaatcagccgtgtacaggcgcggaatcagctgaaaaagcgttgatttccctgaacctgtcgcgcccataatggcaaccgtttctttcgggctggctgaaaaggacacgtgatgcagcgcgtctttttccatgtccggatagcggaaggacacttcgcgaaactcaatcccgcctgcaagcgcccgcgccgggtcgtgccccgttccctcgccgccttctgtttccagcacctcgccgattctttccccggaagccttcgcccgggaaaataccataatgagaaatggcaggacggacagcgcgcctgtaatccgcgtcgcatagttaatgacggaaacgacatcgccgacctgcgctccgccctgagcaatgcttttggcgccgaaccataagataaacaaaatgcagctgttcatcagcagcattaaaatcggcatcgccgcttccacgagacgaaaagcggaaaccgttttttccatcagcttcgtattcgatttcaaaaaacgtttcacttcgtggtttgcacggaggagcgctttaatcagtttgatcgccgtcaggttttcctgcatgatcgtgttgacctgatcaagccgcttttgcacggaccgaaacagcgcgccgcctcttttcagcacccacagcaaaaacaaaagcaaaaccggcaccgtgatcagcagaaaaaaaccgagtttcgcattgacggtcagcgagagaataatgccccccgcaatcattaacggcgccctgagcataaaccggagactcatgaaaagcatattctggacctgcgtcacatcgtttgtcagcctggtgataaacgacgtagatgagaattgcgcaaacgtcgaataagagaaggattgaattttttgaaaaagcccttttcgcgtatcatacgcatagctctggctgatgtgggcggagtagaatgaatttaaaattcccgatgcgaatgaaacagcggtcagtccgatcatcaccccgccccacagccaaaccgtaccgagatcctgctttaaaattccttcgtcaatgattttcccgatcagcaggggctgtatcagctctaccgcaagctcgatgagcatgaaaaacagagcgattcccgccaaaagggaatacggttttacatatgataaagcctttgacatgtgtaagcctccaaatcctttgttcaatattattattttatgcctttccggcaaatgaataaagaaatttggtgtgccgttttttcaataatctgcgaaaaagataaaaccttcccggggaggggaaggttttgaccttattgatccaattgctgttcaatgcgctcccgcatttgcggaacgcctaatccgacaatgacctgaagcgccctgccttttctgacgacgccgtgggctcccagctctctgaaatcggcgtcacttttgacctttgattcatcagcgacagtgacgcggagacgggtggcgcaattggtgacctccgtaatattgtcctttccgcccaacgcttcaatatacaaagcggctgtatcccgctgtgtttcgtctgccgcagccgtttcttttgaagcctgcttccgttctctgtactcctttttcgaatagagctttgtttcctgcccttcctctttttctctgcccggtgtggcgatgttgaatttgagaatgaggaaacggaagacgaaaaagtaaacagcggtaaaacacagcccgatgatgatctggtatacatacgtcaaaccgtggcttgacgccagcgggatccagttcaaggtcgcagcttcgatcaaaccgcctcccatatttccgacgacgcctgccatatacatgacggttgccatggaagcggcaagcaaagcatgaaccgcaaataaaaacggcgagataaaaaggaatgtaaattcaatcggctctgtaatccccgctacaatggacgtcaaggtgaccgggatcaaaaggccggcgacgatttttttcttttcctttgaagccgtggcgtaaaaagcgagcgcgattcccggaatgccgaagattttcgagttgccgtgaagcgcgaagcccccctgcgggaacaattctttcagcggtttgacgctttgagagtattccccgagatgctgggcccaataggtgacgataccgccttcagccacagccggaccgtaaataaacggcgagtaaataaaatgatgcaggccggtcggaattaaaatccgctccaggaatgtgtaaatccacacgccgatcgccccggaagaaacgagaaaactttgcagcgatccgattccggactgaaccatcggccatacgtatgccaccgcaagtgaaatcggtatcataatgaagaaagaaatgataacgatgtaggaagatccttgaaaaatccccagaaaatccggcagttttttatcaaagtaacgattgtgcaaatacacgacaatagatgaaataaagatggcgccgataatattcgtatcaagcgttttgatgccggcgatcatcgtcagcccgctcgttccgccggcttcctgagtcatatcgacatgaaaagccccgccccaaaccgtcagaatcgcattgataaagtaattgaatgtcagataaactgtaagcgcttccaaacaagcccgcgcctgcgcttttttcgctaaggcgacagggatgccgatcgcaaacaggagcggcatttgattaaagacggtccagccgccctgttcaatgacgtaccagcattgataccaaaacccgtcaggatcagccagcggccccatcagcgttttatttttaaacagcgtgctcagaccgacaataataccggaaaatgcaaataataaaacaggcacaaacatcgcgctgccgaagcgctggactttttgcatcatttcacgtgacctcccgctatttatcaaaattttcgagctctttataatcaacatatgcacggaataacgcttcgcccaccagaaaaaacggggcaaatgcgacgatttccgttttatcgcttaacgtcaccggcttgctggtcgcataaagattatacggcgtcgtttgcgccagtacgttgtttttcagattggtgattgaaataaacggaactccctttgcggacagggtccttacctgcggaattaattcgggtgtttcgcctgataaagaaataatgatgaatacgtcatcaaccttaaaatcatcacacatgatattaaactctgtgatgtcctgaattaaaatcagatacttccgccgggatacaaacatccgctgcagctcacgggcgcacaccctctgagccgtccccgatccgtaaacgaaaatccgttttgcttcatctatcagccggcacatctccgtcatatcttttgacttcacgtattttacattggcttcaatatcatccagcagcttttcaaacgtcatattctcgccctcttcaggctgatcctcccatttcagaaaaacacggaattcactatagccgctgaagcccagtttttgggcgagccgcaggatggaagaccgagagacattacaggctttcgccatgtcattgataccgagatggtagcacgtatgtttatgattcaatatatattttaaaatataaaaatcgttgtcatttaatttcgcgtaatgctgattaaccagttcttcaagactcatcccaaaaatccccccgttttctttctattatatagaataacagataaagaaaacggggaagattgtcatcaggaaataggagacgggcttacatcaagctcaggccagtagtccttattagcctccatcagatcttcaagaatcagtcttgccacacgggcattcggcactgtttttgacaggatcagcgcctgccacagcttttgaaatgaccgctcttcccacgcttcagccgtcagtttttcgacagacacctgctgttccatcaggcctttttgaaattgcggtatgttcccgactgagagcggttccggtccgtttgaacctacgagacaaggaatctcaaccatggctgacggatcaaagtttgcgatcgcaccgttattttcaacgattaacagcattctctccccggtgttataagcgatggcccgggcaagatcgacgatataggaagcatgatcatcaattttaatttcactgttctccgatgattgttcgcgcgtaatcatatcgcattggctgaaaatgaaagcttcgcgcccttccatgacttcgttggctctcgtatggttcggatttgattttttcaccatatcatccgggaataagtaatattgcagatatgtgttcggaagcgtatccggatcagccgcctgtacgtcgcgcgcttttttgaaggtgtcattccagcttgcttcagtctgttcggcctccgtcttcggaacgtagccgtattcacggacatgctctttcagcttcggcattaaatcattgccttctcgatccgtgatggacgtccaccagccaaagtggttcaagccgtagtaacggacgttcatttcttttcgtgaagataatccgaggatgttcgccatgcgatcctcaattccgaccggcatgtcgcagatgttcaatatttttgaattcggtctgaggcgccgtgtagcttcggccacaatcgccgccggattggagtaattcagcatccatgcgtcaggcgagtacgtttccatataatcaagaatctccagaacaccgccgatagagcgcatgccgtatgcgattccgcccggcccgcatgtttcctggccgaccacgccgtacttcagcggaatttgttcatcgagcgcgcgcatcgcatattttccgacgcggatatgcgccatgacgaagtcaacatccgtaaaagccgtctctgggtcatcagtcgccaaaaattcaatgtccggcgctttttcttttatgaatacctcacacgcacccgcaatccgctcctgcctttctttatcattgtcataaagtttcagctttctgatcggaaactcttccaggtgattcaaaagcattaatacaattccgggggtaaatgtgctgccgccgcctgcaataacgattgagaatgatttgtctgtcatgtgaagccctcctctgataacgtttacattttatttatatcatgagaaggtccgatctgtaccgggtttgaaggagttagatcatttgatcatttttagttatttttctcaaaaagcgggaaagttcccacaggtacgaaaaaggcctgctgtcatcagcagaccccttctcaaaaatgctcttgtaaatcagaaagcagcacttcctgctcaaattgtggatttccgatcggaaaaatcctggctgtttccttgtcttcgttgacatgctgaatataaatcgggactccttcatacgtcacatacgccatggcggcggattccgaaatgtctttcgcacgctgtgtattcacgtctcaaacctcctttagtcctcacacataacgtgtccggcacccaagagaagtatgcttgtttcttacaattgtccggcggtgagtttgaattttttgaggcgtttgtaaaacgtgctccgcgggattccggccattttagcagccagcgtgacattccccttcgctgattcaagcgcgtttacgatgatgtttttctgaatgtgctcccggatggagacagaggacgcttcttcctgttcataagactcggccgcttctttaagacctgacgcttcaagcagggctgcgatggggcgccctgacagccgtccgtccgggaacatgacggaaagacgttcaaatacattaaacaattccctgatgttccccggccatttccggctctttaatacgtctaaaaagtcaacaggaagctccccccgccagccgcgatttcgctgaaattcaaggaagagtccgggaatgtcttcggtgcgttctcttaatggagggaggtggatcggacagacgtgaagccggtaaaataaatcttctctcagctttttgcattcgacaagctgtctcagatcagtgtgggtggcagtgatgattctgatgtcaacgggaatctcttttgtcccgccgaccggggtgactttccgctcctgcagcacccgtaacagagccacctgcatggagtgtgatatttctccgatttcatcgaggaaaagcgtgcctttatcggctttttgcaaagcgccgctatgtcctttccgtttggccccggtgaaggcgccttccgagtagccgaacagttcgctttcaatcagcttttcggggaccgctccgcagttgacagcgataaacgggccgtttttcctggagctgttgttatgaatcgcccgggcggcaacctcctttcccgtcccggtttctcccgtaagacaaacggttgcgtccgttcgggcgacaagctccagctgctcaagcatatgtcgggatgacgggcttttgcctgccgcaccatgaaatataaacgacggcttttcttcccgtttggataagtaaacgcatgtgaagccgttctcctcccgcttcgtccgcttgatatgatagccctgttcctcaagctcgcgcagcatatgtccggtaaaatgctgaacgggacggcttgcggcgataacccggctcatttcattgcaaagcacgatcggatcatgagaccgggtaagcccggcgaatttgctgatcatgtcaagttctgtcattttgatctttagggcaagctcccgttccgccgtataagcgatggaggaggcaattccgagcataaaaggctgagcgcgggcggcggggcaggaaatatcaatgacacccgccagccgcccgtcttcataacggatgggcgcggcggaacagctccattgatgagaagcgagcgaataatgttcagagccgtgtatcatgaccggttcatttgtataaagagccgtcccgatcgcattcgtgccgacggccgtttccgtccagcgggcgccttttaagaaattgatgcggttcgcttcatgaatggtgcgcgggtggccgtcaactgaatggacaacgccgtctgaatcaatcaggagaaccatcatttccatttcccgcatcgctgttttcattctttctgcgtgcggcattgaggccgctaaaaataacgcatgcttttcggcctgcctttctaaatgatctgccggcattacattcggtcccttttctagataagggttgacgtcggcttttttgcagcggtgccatgaggcggccacccgcttctgaatacgggattcatcgagcacgccttctttcacaaagcgcttccaggttttaaaatcattccgaatgacattcattgtattcgctcccccctgttcagaccatcttttcatatattgtaggggaaaagtaaagcgctttcaacgaaaaataccccttctcatctgagaaagggtattccggttatacggaatgcaccgcaagtccggtgacattcagcagggcttcctgaagcgtttctgacagagtcggatgcgccgcgataaagtgctccgacatatccgccgtcatttcaccgttcatcatcatgaccgcctgaccgatcaattccgtcacgtccggtccgatcattgacaccccgacgatttctccgaattccggctcggcaatgattttcattttgccgccgtgctgatgcttaattaacgcttttccgttagcagaaaatgagcattctccgattttcacatctccgtatgtctctctcgcctgtgtttccgtcagcccgacagctgccatttccggcgatgtataaatacagcggggcaccgcccgcatattgactttgctatcctttcccgaggcatgcgcggcggctgtgattccttcatgaatggcggcatgcgcgagctgcattcctccggccgcgtcgccgcacgcatatatatgaggcacattggtctgcatatggtcattgacttcaatcccgcgcggagaataccggatgccggcttgatccaaattcagcccttgcaaacgcggttttctgccgattgcaaccaaaatgtgatcagcctgagcttcaatttcttttccgtcttttgtccacacggcggttttcctttctttgtcaatccgctgaagggcggcttttgtctgaatatcagccccgctgtctcttaaagagtcttcgaaaacggcggcgatttccctgtcttctgccgggagcagccggtcagccgattcaatcaccgtcactttcgttttaaaccggctgaataaagaggcaaattcgcagccgatcacacctcccccgacaatgagcagagacgaagggattttctgtaaagaaagcgcatctttgctgtcgattacccaatcgccgtcaaatggggcaaacggcagctccgccggttcagatccggatgcaatcaatatccggtccgcttccagaatgtcttttgcgcctccttcttcttcaacaagcaatgtctgctctgtgagaaatgaggctgtcccgctgatgactttaatctgatttgctttcattaagtattgaattccctgcacgagctggctgacgatttgccgtttgcgcccctgcatgcggttccaattgagtgtaatgttttgcggcagttcgatgccgaatgtatttgcatgcctgattttatcgagcacattcgcactttccaaaagcgactttgtcgggatgcacccctcattgagacaagtgcctccgagcggccctttgtcgatcagaacgacttctgctcctctccgcgcggcagtcacggcagctgcatatccggccggcccgccgccgataatggctagtttcattttttcacctctctctataaaatcaaaccggcaggctcttcaagcagcgctttgaccgttttcaggaagtccgcagccggggcgccgtcacatactctgtgatcaaaggtaagactcagcggcagcatgatgcttttgacaagctcatctcctttaaacgccggcgtttcatagcttgcgcccactccgagaataccggcttcaggcggattaagaatcggggtgaaatgctcaattccgtaacccccgagatttgtaatagaaaatgtcgaaccgtggagatcatctccggaagcattgccttcccgcgcccggcgtgccgatgtgctgatgtgatccgcaagctcaaggaatgaaagcttttccgcatcccggatcaccggcacgacgagaccgttttcaagagaaaccgccatcccgaggtggacatatggataggtgatgatccgctcctcttgataagagctgttcagctcaggatgctgtttcagcgcaagcaccgcggcccgggatatgaaatgtgtgaccgtcagtttaacaccgctccgctttttcgcgctgtcggcgagctgctgctgccattttacaagctccgtaatgtccgctttcatcgtcagcgtcagctgggcgctgttttgcaggcttttgtgcattcggtctgcaatcacttttctcatcgctgaagccggttttccctccggctgtgctgtctgaaccgaagactgcggttcagcttctgtcttcatcgccttgatgacgtcagcttttacgattctgcctccgggccccgtcccgttcagcgtatcgactttcaacccggctttctccgccatttttctggcaacgggagatattttcacgcggtgtttgcgcttttgcccggcttttggagcgggaatatgttcaggttcagcttgcggtttccctgctttttcaggagccggcgcctccttctcccgcacttcttcgccgttttccccgatataacagatgggcgttcccggcgggactccttctccctctttgactttaatgtgaagaagcgtgccgctttcaggcgcttctatttccatttctattttttccgagttgatgctggcgatgctttctcccttttctaccgggtcgccgacttttttattccagacggatacttcacctttcttcatcgccattcccagcttcggcattactacttttacagccattctgtatccctcctttaattcattgccggctcgccaagcaattcaagcgtgacgctgacaatttggtctggtgtcggcaaatattgatcttcaagcaccggcgaaaacggcaccggtgtatgcggcgctgtaatccgcttaatcggtgcatcaagcaaatcaaagcccttatcggcgacaatcgcagcaatatccgtggcgatgctgcagcgcggattggcttcgtcaatgatgatcagccggtttgttttttctaacgatgtgaaaatcgcttcctcatctagaggagacagactccgggggtcaagcacctcggcgtcgatgcctttctcagaaagctgtgcagccgcttcaagcgcggtattaacctgcttgccgaccgcaaacagcgtgatgtcgctgccttcgcgtttgatatccgcttttccgagcggaattgtataataatcttccggcacctcgcccttcatgctgtaggacgttttgtcttcaaaaaagaataccggatcattgtcttctattgccgccagcagcaaacctttggcgtcatacggattggacggcacaaccgtcttcagccccgggatgctggtgaacaggccatacagcgcctgcgaatgctgagcggctgcccggaacccggctccgtatgtggtgcggacggtgatcggcacttgcgctttaccgccgaacatatagcggaatttcgccccttggttaatcacttggtcaaagcacgttccgataaaatcattaaacatcagctcggcaatcggtctcagccccgtggatgccgcagccatggccgcacccatatagcccgcctcagaaatcggtgtatccagcactcggctgcgcccgaattcctgtacgagaccctttgtgaccccgagtaccccgccccatgcctcatcatcttgcaaatgatcgaccgccgctcccccggcgacatcctcaccgattacaagcacattgtcgtctcttctcatcgcaagcttcattgcttcattgatcgcgtccgacatgcttatgactctcgccatctcacattccccctttttcatatgacacgtagacgtctgtcaacagctcagactctttcggataaggactcttttcgctgaacgagacggctttttcaatcgattcgctgactcgctgttcaatgtctgacaatttatttgcatctgtttcttttagaagatagtttttaaagccttggatagcatccttttcttcaagatgctcagtcttttcatcctttgttttataagtttgggcatcgccttcgaaatggccgtagtttctgtaagtcatacattcaatcaaagacgggcctccgccgtttcttgctctttctatcgcttccccggctgcctgataaaccgctaaaatatcttttccgtccaccgtgacccccggcatgttgtaggcagccgcccgatcggcgattgaatcacaggctgacgcgtactcaaatgtcgtggcttcgccgtagccgttgttttcggcgatgaacacgacaggaaggttccatactgccgctaagttcagcccttcatggaaggtgccttggttattggctccgtccccgaaaaagcaaacgcttacatttttagtttgtttatatttagccgtgagcgctgatccgcatgcgagcgtaaatccgcccccgacgattccatttgcgcctaacatgcctttatcaagatccgcaatgtgcatagaaccgcctttgcctttacacagtccggtcgcttttccgaatatttccgccatcatgccgtccagatcacagcctttggcgatacaatggccatgtcccctgtgtgtgcttgtaatgctgtcgccatcatctaaatgagcgcacacccccgcagctaccgcttcttcaccggcatacaaatggacgaatccgggaagcactccttgcgcgaaaagttcatgcactttgtcttcaaagcccctgatttccagcatcttttggtacatccacagcgctttttcctcagttaatgacaagccttctcgttttaacaattccattttgtgcgcctccttctatttagggttcacacttataaatgcaagaagcatgccagcctttgaagcccgtaaaatgaatgtttttattttttcaatggagacagtttgagacaggtgtctcattttgtctcgatccgttccctttgtctcgttttatggcatacaaaaaagaccgggcatcaccctgtctttgacaatgatcgacgtatttatttcctcggaaatcttttattgcttcattcttccgcatacagtctatcacggcgtttgagtggttacactctttttttcatatccacgcgctgcagttcatccttttcttcaacagcccgattcagtgcttgaagcatgtaaccaatgcctttatacgatgacagaggccaggtgatatgctgatgctctccgatgacggcgtttagaatgcttcggtattttttcccgccaagcatgacaagctcttcgacgtcggaaaagcctttttcataaaattgacggcgcagctcgtccgctgccatgatctccgggtgaccggttccaaaagtgacatcgtaatttccgggaacagtatcatccggacgaagaaatccgtgcttcgccgacaaaatcacccactcatcgaaaaatgctttcgcatatcgctcgcatgcctgatgaaacgggctgagataagcgtcttccgcccttaccggccctgtatctgaatggacatcccaaatttttttcttgccgcaggggatgatgcacagtcgtttcatttttctctcccctttatgatgtatctcctatcaatgtaccattattcgtttatttctgcatgacgaaaccggccatggatctgtctgggtaaaagctgcacacaaaaaggcccggaattcaaaccgaaatccgggccggatgatgagttgtttatgtcactcttgctccatcccatcaagatactttctctcaaagtcatcgagcaatgcacgcacttcatctgttgactttgtattcatgcattgatttcttaattcacttgctccccggaacccgcggagatatatcttgaaaaagcgggggagcggtttatatgctctggcttctgcttttgaatattcatcatgaagatccagatgcaatctcaaaagatcaagcaattccttactgctatgctctctcggctccttttcaaaggcgaacggattagtaaaaatgcctcgtccaatcataatcccgtcaacaccgtattgttcagcaagtttcaagccggtttcacggtcaggaatatccccattgatcgtcaaaagggtatccggcgcaatctcgtcacgaagtttcttgatttccgggatcaactcccaatgcgcatctactttactcatttccgctcttgtacgcagatgaatggaaagattcgcaatgtcttgtttcagtatgtgtgtcagccagccgcgccattcgtcaacatccgtgtagccaagtctcgtcttcacacttaccggcagacctcctgctttcgccgcctgtattaattcggctgcaacttcaggacggcaaatcaggccgcttccctttccattccccgccacattaggtacaggacagcccatattgatatccaggcccttaaaccctaattccgccattccaatactcatttggcgaaagttttcaggcttatctccccatatgtgggcaaccatcggctgttcatcctccgtgaaagtcaaacggccgcgcacactatccttcccatccgggtgacaatagctttctgagtttgtaaactctgtgaaaaacacatcaggtctgcctgcttcactcacaacatggcgaaaaacgacatccgtcacatcttccattggtgccagtacaaaaaatggccgcggtaattcacgccagaaattatctgtcataacaaatccaaatcctttcatgatgggatacagtgaaacctttatcccaaaattaaaaactgaccatgcttcttttacacttatagcatgtgtcagcacttcttatcaaacgatagtaaattttgaacatttcactttttacacgttaaaagtaaaaaagcaaactggagtagaacacattaattgagctaacgtaatagactaccgctatagtcaaccccatatcgtttatttctgatcaactcagtcaactccttcacctttaaaagggtttgagagagaaaaagtgtgatgattatctacacctaatttttatttatattgtggtttattaagattagcgctgaccttcatctttcttagcggccttacttttgctctttttggataaaaaggattccaacctaaatagaatatcatatgagttctccctattaccataaaacaaatttcaagaaataagttgattaagcaaatggggctggggggtatatctgagtactgaaaagaatgtaaaaagaaaaagccttaacttgccgcttgtgaatcacatggagtaaagaggatggcatgggaaaataaactcgaacttaacagaattcaagaacttcaatctggatcttttcggatttactcatggtctagaaataatcaacgccgcaagtggcttggctctatacagtatatgtactaagggttgatcggcttttaaaccccgtatgttaatatctttatacaatcacctatatatatttgtataaggttacgcttcggtaatcctgatccaaaaccaataaaatagactgctgactaagtgccgcagtcttcattcataagattaattagaaagtgttcatgttctttcatcattaaataaggcatcagaagttattgctttcatttcggatattctttgttatacctttaatgatttgtataacagtgaaaacccccaagaaaacagtgacaatattaaaccatggattatcatagaatgaaagatatgtttgaaagaaatccagttcagctatatttgctgggaatccattcatttctctataattaggaccccatcccgttaattctacaaagttaaaataaagctgtgatactaaaaatgccaacaacgtgtgaaaccaacttcttttatatactttacccatttctttatccatttccttttctgcaatactttttagcctagtgtcaatctaacatcattatatgatgaagcatgattgtcgcaataattacttattaaggatataaccatcgcaggtattactgtaatagttgttatcacttgcgtttccgccttatatttattcctttttttagaacaagaggaatagttggggtccttttcctgtttaggctttcatattatatataacgaccaaacatgcttttttagtgtatttgatcttttatcgacagttgttgatatgccaactgccgctgtgatttagtgaaagttagcacccttgccttttacagcttctacttcagaaccttcgttcagttgttgaaatctcaatatctctcgttcggtttcacctcctttttatcatttattaaagacctacttactttggcatgataaatactttacagttgaataatgttacaacttcatctcaaaccaatgatatcaaattattttacattatcccattaatgtcacaataaaccacagcgtcattatacaaacgaggtcaaaattggctgttttctcctcgcttttccacacgttttttcaactcttttcatcagtttaaattaaagatctccgagaaaagaaggaagataaacagccagggcaaaggctgcgcataaaaaaaaccggaaatcggaaatgtttataccgaaatccaggtctgattacgaattgtttattttagttagacgatttcaacacaagcttcgccacagcttccacatgggccgtctgcggaaacatatcaacaggctgaatatattcgacgcgatagtctttcgacagcgcctgcaagtctttcgccagtgtggaaggattgcaggatacgtagacgaagcgtttcggttttacttttttgatggtatctaaaaatgttctgtcacagcccgttcgcggcgggtcgacgatgaccacgtcgggacggaagccttctttcgtccatttcgggagccagtgttcggctgttcccgtgacatatgccgcgtttttgatgccgtgttttttggcgtttttcttcgcatcatcaattgattctttaatgacgtccatgccgcggatctcttttgcgccgcttgaaacccacatgccgatcgtaccgacgccgcaatacgcgtctacgactttttcttttcctgtcagctgagccgcttgtttcacttcgtcatatagcttgaccgtctgctcagggttgagctggaagaaggcgcgggcgctcagttcaaatgacacgtcaccgagcacttcttgaatggcatgtcttcctgccagcgcttttgttttgtcaccgaaaatgacggatgtgcgcgcgccattgacgttttgaataatcgatttcacttccggcagccggttctgaatggctttgacgatctcgtctttattcggcagtgtctctttcgcggtgacaagcacgacctgcacttcgcctgtttcaaaaccgactctcgtcacgatggtgcggacatcgccttttttggtccgttcgttataaacggatacgttgtgtttttccaaaatacggcggacgatacccgttgttttgtttgtcgccggatgctggacaatgcattccttaatcgggacgattttatgggaatcaagtccgtataagccggcaatgatgctgccgctttgcgagcgtccgacttggaactggcttttgttccggtaattccaagggttgtccattccgatcgtatctttaatgttcatttcttcgacattgaatctcgtatgacgttccagagactgaatgacgatgtcgcgtttttcgcgaagctgctgggtgtatgccagatgctgaagctgacagccgccgcactggtcgtagaccgggcatggcggcgtgacgcggtgttcagacggcttgcggatgtttttgacgcgtgcttctgaaaatttcggctgcacatttgtcgcttcggcaacgacttcttccccgggcagagcgccgggaacgaagacaacttttttcttaaaatagccgacgccctctccgttaatgccgagacgtttgatggtcagcggaaatgtctgcccgattttcaattcggcaggcgcctttttttgatgttgattcacgtttttttctctccgtttctatataaagcctttctcctgggaaagcggctgatttgaaatatcacatcttttcagtataacatgcagccggcggttccttcatgtttttcactggaagtttccaaaaaatgatcaaagcggtttttcattcaatacttctccacaaatataaggacgcatagcttaaatacggcgcccattcgctgcttacctgaagcatcacgtctttcgacggtttatcctcaagggcgaagcggcgtttgatggcattttgcaggccgatatccgccaaaggaaacagattcgggcggccaaggccgaacatgaggacgttttggacggtccacgggccgatgcctctgatggtgatcagctttttcataatgtcttcatccgataaatgggtaagttccgccagattgagcgctccgtctgcaatcatgcgtgaaatgtcaatcgcatattccgcttttctcatgctgaactggagctcccgcaagtcctgataatcaagcgccgcgatcgttttcggctcgggatagcaccagacgccgtctttttgttcaccgaaggcatggacgaaccgttccgttaaggtaaatgcgaaagacaggttgagctgctggtggatgatgcatttcatgagacagttgtagacgtcatattccaagacgagcggggttcccgcatgctcctcaaaaagcgccgacagatttgtttttgagaaatgatcaagcacaggctgaagcggctgttcccattgaaaaatgtgtttgatccgttcaatcatctcctcgcggtccgtttctccgctgacgaggaagaccgggtctgcggcggtgccttccgcttgaaccgtagtgacggacagtttgccgtcccgtgttctgagcggcactttgattgatcttgcatgaagatcgaccgcattcagcggatcgagcgacagcctctcaaggactttatcaaaatgatacggcggcgtgaccgaaaccgtttccttccacatatgctccacccctttttgtccaagtatatcatgaagcgggcgggcggcaattcgtatacttttcttcataacgccgcatgatataatggcaggcggagggttgtttatgatacatataaccgcaatcacaacacataatgagatattagataatatccccctatcacgtacagaacaaccggacatcgcatggtactggatcgattttttcggcgctgagatgcatgaaaccgagctgctgcgggattattttcactttcatccgcttgcgatcgaggattgctttcagcatatgcagcggccgaaaatcgaccattatgacggctaccgtttttatgtgctccacgccttgaacccggacacactggaaatggaagaggtggacatctttcagtccgaccgtttcatcgtcagcttccatttgcacgaatcgcccggcgtctcaagggtgagagaacggtttttcgcttctccgggattagccaaaaaagggccggggcacatcacttatatgattatggatcagcttgtcgatgaatatttccccgtgctgtacaaaattgaagaccggctgaatgaaattgaagacagcagaacacataaatcttacggcactttaatgaatgaagtgtttgaattgcggactgatcttttgaacctgagacggacgatcattccgatgcgcgatttaatgtaccggattttgagccttgaccatgtaaaagaaagccgtgaaacgaaggcgtatttcagcgatatttatgaccatctgttaaaactggccgagctgatcgagtcaaaccgtgatatgacgtcagatttgcgggacagctatgtgacgctgaattcaaaccggatgaacgccattatgatgacattaaccatcgtctcgaccatttttatcccgctgacgttcatcgcgggggtttacggcatgaatttcgataacatgcctgagcttcattggaaatacgggtattttatcgttttgggcgtcatggccgttcttgtcgccgccatgctgttttggttcgcccgcaaaggctggtttaatattttcaagtaagaacggctgccggctgttcttttttttgagaaaacatgatagtctggaaaaaaacgtaaagaggtgtgcgccgttaccatcctttctcataaaatcatttcttctgtcctcctgcttttcagtgtcatgtccattgccccgctgtataacggccgtacggtgtctgattacatctttgagtcgctcggcttttcttcctggtctgaagacggagcccatatctccgtcattcccggggtcgtcctttactttgcggcgttaatctggtgtgccgccgcgttcaggcggacgcttccctcggcggggctgtttctgatctttctcagtatgggggccgcttccggtatcagtcctgccaccgaatatgccgctttttccttaaaacagttcgcgcccgaaaaagagtctgtcgaatatttgaagcaccgcagcgaatgcagtcatctgattgaacgaaaaagagcgggcatgagctgcacgctttatatcaatcattacggaaaaggggaacaaaccatttctgtcacgccggatttatcagaaaacataaaggacgtcacattcaaatcaaaaacattcactgtaaaaccccgttcaaaaacaatcatcaaaacccgatttaccggattttataaggggacagccgcctcagactccggatggtcttcagaaccggaactgaaagtggcaatcctgtacacagcagaataaccattttgcatgtataatggtggaaaacttttcattggagggactgtcaaatgaagatcgccatcgtcggactcggcaatatgggccgccccatcgccgaaaatatcatgaaagccggatacagcctgactgtatataaccggacgaaagaaaaagcggctgacctgctggataaaggggccgaatatgccgaaacgccccgccaggcagctgaacatgcggacattgtgctttcaatgctgtcagacgatgaagctgtaacaggcgtgacgttcggagcttgcggcattattgccgggttatctgaaaacggcattcatatttcaatgagcacgatcagtacggcgctgtcagaacagctttccgccgcacattcgggcagagggcagtcctttattgccgctcccgtcctcggccgccccgatgccgccgagaaggccgagcttcgcatcatcacagccggaccggcagaagcgaagaaaaaggccgaaccgctgtttaacatcctgagtcagcaagtatttgacacgggtgaagaaacaaaaacggcaaatgccgcgaaaatcagcatcaatttcttgctcgtttctatgctggaggcgttatctgaatcattcttaatgatggataagttcggtttagaacaaaaacaatttctagaaatcgccaacgcactctttggctctcccgtctatcaaaattacggcacgatcatggctgaggagaaatttgagccggccggcttcaaaatgtctttagggctcaaggataccaatctggcgctcgccgccgcagaacaggtttccgcaaaactccctcttgccgaactggcgaagagccattttgaaagcgggatcgcacaaggctgcggagatttggattgggcggcattgattaaatgtatcaaataacaaaacacctctccattaccaggagaggtgttttctacaggcgcggcagcttcatttctttctcaaacatcaggtcatcaatgcttttaaacgtgtagccttcttttttcaaatcggtaatggcatcgtccagagcttctgaattgtcctttgaaacggtgtgaagaaggtagatcgcgccgggatgcgcctgctttatcatgtgatcataggcgtattgttttcctttttgctcgttaaccttccagtcgacaaatgcgacggaccagaaaaccgtttggtagccgagacgcttcgtttctttgaggacatattcgctgaatacgccgcgcggcggacggagatacaggttgtcccgctttccggtaatgttgtacacagcttccgtgacggaatcgagttcgtcttgaatctgatcgcccgtttttgtcgtcagatcaggatgatgaaaagaatgattgccgatgatatggccttcctttgacatccgtttaatcaaatcaggctgctctttcacaaaatgacccgtgacaaaaaaagtgcccgtgacgtgatgtttttttaacacatcaagcactttcggggtgtacccattttcatatccgttatcaaacgttaaatagatggtcttttctttcgtattgcccaaataaaaggcatcatattttttgaccagattgtccagctgtctgccggcatccggcggctgatgattgacgctgcgtttaaatccccagtttatccgttcattcggcaccgcttctgcgctgttgatgcctcctgcaagtaaaacggccatgcagcaaattgaacaaaaccatttcatgaccagcactccttctgcatttttccttattttgcagtaggccctgcccttttatacagccgcattatggaaaaagaaaaaccccggcatccgccgggggttattcccaatcctttttaaagcgttcgtattttgcttccagatcatcaagcatgccgatgagccggtctatatcttcaacgtccgttgattcagggtctaatgaatcaatgacattcataaacatatcgagtctgttcttcaggtaatcgagctgctgatctttgctgtttactgcattccccatacttccactccattcattttttataatggtagcgtattttttggcgtttttcaatggttccgctacttgcgatcttggcagatcaggtctaaaattaacagttggcagacgttagtatgcccatttataaaggagttagatagtcatgacacaaaacacagcactgcgtccgattacaccggagtacgatccttgggaagcgtacatggatgtcgaccagtatggagatatgaaactgacgaacgttgaattcacaacgacgactttgtgcaatatgagatgcgagcactgcgccgtcgggtacacgctccagccgaaagacccggatgcgctgccgatcgaccttttattaaagcggcttgatgaaattcctctgttgcgctctatcagcattacgggcggcgaaccgatgctttcgctgaaatcggtaaaggaatacgtcgtcccgcttttgaaatatgcgcatgaacgcggcgtgcgcacacagatcaattcaaacctgacgcttgatatcgggcgctacgaacggattattccttatttggacgttcttcacatttcccacaattggggaacggtcgaggactttgccgacatcggatttgcgatgatggagaagaaaccgacatttgaacagcgggcgcgctattttgataaaatgattgaaaacagccgcacgctggtcgaagcaggcgtaatggtttcagcggaaacgatgctgaacaagcggacgctgccgcatattgaacatattcaccggcagattacggaagaaatgaaatgccagcggcacgaagtccatccgatgtatccgagtgatttcgccagcgcgcttgaatcactcagcctgaaggacatgagacaggccattcatcatctgctcgacattcgcgatgaagagacatggatgctgttcggcacgctcccgttttacgcatgcagccctgatgaagaagaccagaagctcctccgccgcctgcgggaagcgaaaaacgttacggtgcgaaacgaccctgacggccgctcccgcctgaatgtcaacatttttgacggaaatatcattgtcacggatttcggcgatacaccgccgctcggcaatattaaaacagacagccttcccgatgcatatgacaagtggagacagacgaagctgagcaaagagctgaactgccgctgcacaaacgtccggtgcctcggaccgaacgtccttgtcaaaaacagttattatcaggacacggatttttcattacgaaaagccagaggttaacagaagatggaaacgacaattacggatattttgaaaagcaaagtggttgagatcatcatcgtcgctctcgtgctttacgccggtgtttttctgatcaaccgctttgtccaggtgttatttaaacgcatagatttcttggaggaacggaaagggaaaacgattgaaagcctcgtccgatccatcacccagtatacggcgacgatcggttttatcttttacgtcatttcgttattcgttcatgatttcggccgaattttagccggggcgggtgttgccggtatcgtcatcggtttcggcgcccagtcgttaatcaaggacatattggccggtgtctttttgatatacgaacgccagcttcataaaggcgattacgtgacgattaacaatctgttcaacggcacagtcgaagaaatcgggctccgttccctccagatccgtgagtggaccggcaagctgcttaccatttcaaacggtgaggtcagacagcttcaaaactataatattgattttatgcggattaccgagtccgtcgtgatcagttataaagaagatcccgagcgggtatatgccgtcttagaaaaagcctgcgacatgctcaatgatgagcttcgcgattcactgaagcgggatgaatttctcaatgcgacggagccgtttcaagtgcatggaatcatgagcctgaacaaattgacgagaggcatagaatttaccgtcaaaggcatggttcaagataaagaatacttctcggcaagccttgcggtgagacgcgttcttgcccgggagctgtacaacaacaatgtgcaattgcttgaggaaatgtatcacacacaaaaaagctgattcccgaaccggaatcagctttttttatttatctcggctgcgctgtcatttgaaaaccgaatgtgacgtgatcctgcaccggaatccaagccccgattccttgcgaagtcacatttttgacgacaagtttccgcttgctgcctttcagcaccaaatacacttcaccgtatgttacttttcctttttcattaacggccggagcgtaggcgtgcaggtagccgagccgctgcggagaaattttgtaggtttgatcgcgttttgtgcctgcgccgataaccgtttcaaacgcgagcggcagttttgttttcttcatcgctttttgcatcatcatgctttttacgtcttctgcgttcggcaccttcgctgtgagcccgcctttaattttgtactgctgttcttgggcgtatgagataaccgcggtttgctgtccgccccggttatccgctctgttcgtattgatttttttatattcccagttggcgaccgtttcgttcgattgatagccgagcgcccatttcccgagaaatattgtcgcccggtagccgatggcaagcggtgaaccggaaaccgaggattcattcagcatttttatcagatgcggattttcgatgttgatctcggatgtatctaacaattcctttgccagtttgctcggctgaagcatcggctggtcctgtgaagcattcggatacgtattttcctttgaaatgcttacaacagagttgggaaccttaaacggtttctttgcaccggcagacggcattgcgaaaaaactaaaggataacagcagaatcagtgtggcatgaaacagctttctcatcatatcactctttctatagcattttcctttagtcttttcctccgcaatcgttgttatccgcattttttacaggttaaagcaggaaaaaaccgatcgccatgatgacataagcggcaaggagcgtagccccttcaaaccagttcgaatcgccgtcatttgaaatcatcgtcatcaaaaggacggatgatatcatcgccacaagctcgggcaatgtgaatacaagcggcatattgaccggaaaaaagatagaacagatcacaagaaccggggctacaaacatggcgatctgcaaagtcgaacctaccgcgatttcaacggcgacatccatcttgtctttgtacgccataataatcgccgacgcatgctctgcggcatttccgacaattgcgacgataatcaccccgataaacagctcgctccagccgaactgttcagccaccgcatgaaacgtatggacaaggttttcagatatgtaggcgacaataatagttgaaataaataagacggctgtcgctcttttccccgaccactctggctgctcctcttcttcctttgcctccggctgattcggctgataaacaccgcggtgagtgacgagcttgaaataaagagctgccacgtacaaaaggatcatgatgatgctgatgccgacactcaaatcaagcttgtttttttcccccatatctatggaaaacacttcgggaatgacaaaagctacgataatggcaaaaatcagcaggcctgaattatgccgggcatcatgaatattgaattcctgccgcttgtatttcaaaccgccgataaaaaatgacaatcccgcgacgagcaaaagattgccgagcaccgaaccggtcagtgaagcaagcacgatgcccgtcagcccttcttttaaggcgaaaatcgatataatcagctctaccgcattgccgaacgtggcattcagcagaccgccgatccgcggtcccgcgataatggcaagagattcagtcgctctccccatataacttgcaagcgcaataatcgtcaagcaataaataataaacaaaaccgctgacggccagtgcatcaggccgccgatgactgaaagcggcactcccgccgcagccgtaaagaaaaaaatccgattcatatctgcctggctccttttttcgaataagtctttttatatccttctcaaaaactccttcaattacacttcctcggcagcccgaattggcattttcaggttgccggacgcggcaaatccgtgtacgatcaagaaagatactgaagaaggagaaatacgcgatgtcacgactgtacttctttattttggttctgcttgtttccatctccggattttcccaaggcatgcttctgccggtgatctccgtcatttttgaaacgaacggagaatccgcagccataaacggacttcacgcaaccggcctttatatcggcgtgcttctggcgtcgccgtttatggaggccccgctgcgcaagctcggattcaaacctctgatggtcatgggcggatttcttgttatcatcagcttattcagttttatttggcttcaatccatatggttatggttttttcttcggctgcttatcggaatcggggatcatatgctgcatttttcaacccaaacgtgggtgacttccaagtcaacgccccgaaacagaggaagaaacatttcgctgtacggactgtccttcgggcttggattcgctgtcggcccgttcatggtccctcttgtgaaaacaagtccgtcccttccgtttatcgtatccggctgtatcagtctttgtgcctggctgtttgtgtttgccttacgtaacgagtacccggcgcaaggtccggatgaaacatccggggacaacagcgcaaaacggttttaccgcgcccttcttttcggctgggtcgcttttctcccggctttcgggtacggttttttagaaacggcgctgaacggaagctttcccgtgtacgcccttcgtttaggcatatccgtggatgccgtcgcgctgatattgcccgcttttgccatcggaagtattgtattccagttccctctcggtttattaagcgatcgattcgggagaaaacgtgtcctgctcgtcatcttattaacgggtgccctttgctttttgacggccggactgtttccgtcgccttctgtcatcggctgctgctttttcacggcggggatggcggtcggcagtatgttttccctcggcatcagctatatgagcgacctgctgccgtcccatctgctgccggcgggcaacctgctctgcggcatttccttcagcctcggaagcatgatcggcccggtggcgggcggctggtatatgcagcggtttgaaagcgccaacttgttttactttattacggtgattctggtctgtatttggcttgcgctcgtcttcgggaaaacaaagcacagccccgcttccgaatcccattcttttccggccacataaaaaagccgcctgatctgagccaggcggcttctttctagtggtatccgttctgcccgttggcgcttccgcttgttttattcttcgggccgttttttgagttttgtttattatggcttccgccttttttcgtatgcttggtcatagccgattccctccgtttttcagcttgaacgtcatccgttcctctatagcttgctcccgcggtacggattttcatcaggaagctttttacgtttatgtaaaagcgcgttgatttctcctcctaaaatcaacaaggttcccgtaaggtaaaaccagatcatcaggacgataattcccccgatgctcccgtatgtggcgctgtagttggcaaaggtgccgacgtaaaatgagaacagcatactgacgataatccagccggctgccgcgaatacagctcccggcaggacaaaacggagggaaagctttttattcggcgcgaatatgtaaagcgcggtaaacacgattaaaaggataagcggactgataccccagcggacaaccgaccacacctgcaaaaacaggtccgaggcgccgatgaaatccgcggccagcattccgatttctctgccgaacaccggcagaagcagtgcgattaaaatcgtaaccaccatcgcaatggttaaaaaaattgaggtcaggcgaatgatgataaatgagcggttttcctcgacttcgtaggcatggttaaatgctctgacaatcgcgttcataccattcgaagccgaccagatgacggcgataatcccgaatgacaaaagcccgccgctgcgcttgttcagcgtttgctccgttatggatttcaccatggacatggcgctgtcgggcgcgtattgatcgaccgccccgagcacgtcttctgccgatatgggaagataggcggtgagcgtcagcatgaaaatcattaacggaaacaatgacagcaggaaaaaatacgccagctccgccgatttactttgtccttcatgcagagaaaaccttgcaaacagctcctttataaaactcatgacatcccacctcaatgatcgtttttcgaaaaatgctccttcgtttcttttaacaggtcaatgacctgcggtgtcgtctgcttcagcttggtgatctgcccgtttaaaaaactcagatcttccgatacggtattggcgaagattttcacttgatccatttttgcggaagcctgctgcttcagggcttcaggatgttttcggtaaaatgccgcacgccgcctgcacgcgtccatgttccggaaacatgcctctctcgtcggcttatgtaataaggacagtgctccgccggcggcagcgccgatcagaatggcttttgccatgatgcgtgtctgcttcatcggtcaatcccccttataaatgatggtctttctttattgtctccagcaaatgacggcacccggactcgaccaaagcgtacacctcgctgaaatttccggtataatacggatcgggcacgtcggcaaggtctgactccggtacataatcaagcagccttgcaatacgcggcgccgcttttttataaccggccatgctgcgcagatgtccgatattttctgcatccatcgcaatgacgtaatcaaaatcggtcagatcagactcacccgacctgcctcgccgtgatgccgcttgcgctgatccctttctccttcaggatctcctttgtcccttcatgcggcggatttcccgcatgccaggcgccgattcccgctgaatcaatgttaatctgcccgttcagcccgtttttcttcaccatatcagaaaataccgcctctgccataggcgaccggcaaatatttcccagacagacaaacagcacatgtatcatatcgataacctccctattctttccccgcattttgaggatcaaaaaccttatcaacatcttagcaatttttctgcggctgtggaaataagcttttattctaaatgaattctgttagaataaaggggacgaaaacgatcatgaaaggatgcatgaatttgccgagccaacaaacagaaacgttaaataaaatgattgaagacatttcgcaaaagctcaacatgctcaatgtcggcgtcatcagagcggaagatttcagtgatgaaaaaatagaagatcttacataccttcatcaaatggtcatgaaaaaagcatcattcagcccgagtgaaatgcaggccattgccgaggagctcgcctctctcaggaaataaacccatgtcagacctgccgaaaaacggcgggtcttttttgatttaaaaaagtaaaaaataaaagttcatcggtttgacacatataaaaagaaggagtatagtaactgtgaacttggtagaacgatatactaaatgagcgggccgcttatctttttttgtttagtagaacgatatactcattgtgatatcagcgttattcaagtttgtctatgcaaccgttgtatcaaacagttttcaaagaaaggcagtggttcaataaaggggtatggtgctgtgcttttatcaattaaaaaaataatttaattctttattaaccgcattaggggatgtcatcatgaaaaacatatacaccaaaatggcagcgggtctttatattaactatttcctgctgggcatgatcaatattattatcgcatccaatatggaggcattatcaaaacagcttcatacttccgcagccggtgtcagctatttggtctccgccatcgggatcgggaagctgatttcgcttctgtttgccgggaagctttcggatacattcgggagacggccgtttatcgtgtcgggcgcctttctgtatctgattttcctaatcgggattccgctttcgacaaactatacggccgcgtttatcttcgccattttcgccgggatcgccaattcctttttggattccgggacatatccggcgcttattgaaggatttccgaaaaacgcaagctctgcaaccgtgttaatcaaagcgtttgtatcaatcggcgcgacggtgcttccgttttttatcgcgtttattgcggacaggcatttgttttacggctggacgtttttcgtaccgggcattattttcttcctgaacggcttttttctgttgaaagttccgtttccgaatcataagcaaaaagaagacggcggccggacggaagcctctccgtctgatgacgcgttcacatcacagccgtcgatatggcgcgaaggcgttgcgatcattctgttaggcttttcatcaacggcgctgtttatgctcgttcaagtatggcttcctaagttcgggcaatccgttttgggcatgcctgaggtgcaggccgtcaaattgttgagctattacagcatcggggcgcttgtgtccgtgttattgctggctgtgctgttaaacagagtgattcagccgattacggtaatggtgctgtaccctgtgatcgcggcaatcgcgctgcttgctctgattttcattcagcagccggccgtatcggtcatcagctcctttgtcatcggactttcaactgcgggcattctgcaattggcgatgacggttatggctgttttattccctaaaaataaaggtacaatcacatcttttgttaatatagcatcaagcttatcttttattgtcattccgcttgtaacgggagcgatatccaaagccgccggcctgacgcctgtttttctgcttgatatcggaattgcggccgtcagcgccctcctcgcattgtttatcggaatccgctttaagcaagtgatgaaagcctgactattttttaagggagaggatttatcatgcaatctatcacaatcagaaacacggtcatcggtgaagggcttccgaagatcattgtgccgctgatggcggccggagagaaagaactgctcgaagaaattgaagccgtcaacaggcttcgcccggatatcattgagtggcgggcggatgtatacgagcatgttgacagcctggacgccgtaaaaggcatgcttgaaaagctgcggaaagccgcaggagcaacaccgctgcttttcacattcagaacccataaagaaggcggaaataaagttattgatgaccgcttttacattgaattgcttaaaaccgccatcgaaacaaaacatattgaccttgcagacgttgagctgtttacgggagaagcggaagtcaaatcaattgtgaaaaccgctgaagacaacggcgtatatgtcgtcatgtccaatcatgattttcatcagacaccgaaaaaagaagaaatcatttcccggctccggaacatgcaggcgtacggcgcgcacattccgaaaatcgcggtgatgccgcaaagcactgaagatgttttcgtcttattggatgccactcacacgatgaaaacacaatacgcagaccggccgatcatcacgatgtcaatggcgggaacaggcctgatcagccggctggccggcgaagtcttcggctcagcgtgcacgttcggagcgggcaaagaagcatcagcgcccgggcagattcccgttgaggaattgcgcagcgtactcagcattttaaataaacatatgtaatcagcgttttttgccctcaaagcgggaggaaaaacaaatgaatggactaacggaggaatacatcatgaagaaagaattaggacggattaacggaaaaactcagcttatcggattattcgcgacaccgatcggacactctttatctccggcgatgcacaacctggcgtttaaaaaattaggattgaactacgcttacctcgcgtttgaagtcggcaatgaacagctggaagatgtggtaacgggaatgcgcgccttaaacgtcagaggcttcaatgtctcgatgccgaacaagatgaacattctcccttatctcgatgaactcgcggattcagcgaaatttaccggcgcggtaaatacagtcgttaatgaaaacggcagactgatcggacactccactgacggtatgggatacgtccgcaacttaaaagaacacggcatcgatatcacagggaaaaaaatgacgctggtcggttccggcggggccgccactccgatagcgattcaatccgcattggaaggcctcggagaaatctctattttcgcccgcaatgacgcgtttttcgaaaaagcggaagaaaatgtccgcatcatcaatgaagaaatgaagggatcttcttgtaaagcgaaagtcttcccgctcgaagatcaagatgcgctgcgtgctgaaatcgcttcaagcgatattttcacaaacggaacaggtgtcggcatgaaaccgcttgaaggcttgagtgttattgaagatacatccatgctccgtccggatttgattgtgacagacgtcgtttacaaccccgttacgtcgaaattgcttgaacaagctcaagcagccggctgcaagaccattaacggtctcggcatgatgctttggcagggcgccatggcgtttgaatattggacaggccgtgaaatgccggttcagtatattaaagagcaaatgtttgaataacctattgtgacagaagcgccgaaggacaatccgtcttccggcgctttatctttttccccctcctctctctttcttctcatgcgccaaaacgcttataatggatgtaacgaataaaaaccaagtgaggaatgcgacgtatgaaacagcaaaaaaaacgccgggtgacattgcagcaggtcgccgaacatgccggcgtctcaacatccaccgcttcattaattgtccgcaataatccccgaatttccgaagcgacccgtgagaaagtgctgcaatccatgcgggagctggggtacgtatatgatcgggtcgccgcgaatttacgatcacagacgtccacaacggtaggattgattatcactgacatttccaatacgtttttctcagagtttctgatcggcgttcagaatacgcttgaggaagtcggattaacggtgctgttaggcacgacatttgattccgtcgccaagcaggagcagctgatctcgaccatgctggagcacagggtcggcggattgattttgtgtccggtttcagggacggctgaggaaaccctttcccgccttgagcagcttgacattccggtcgtgctcgccgtcagggagattgccgatgccaactgtgattttgtcggagccgattatgaggaaggcacctataaggcagtgcgtcatttcattgagaaaggccatcaggagattgcgtttctgggcggcgtgaagcactcatcaacatggacgaagcgtatgaaagggtttaaaaaagcactccgtgaagcggatctggaagtgaaaaatgaatatgtcattgacagcgcgccgacccgcgaagcaggctgtgacgccgtgacggagctcctccgccggtctgagcgcccgaccgcgattttctgcttcagtgatttggtcgcattcggcgtcatgcaagggatcagaaaagccgggctcgttccgggcgaagatattgacattgtcggctttgataacgtgccggaagctgaaatttcttatcctccgcttacaaccgtttcttcctttccgcggcagtcgggaaaagaagcggctcaattgctgcatcataaaatcaccaattcccagcacaaaaaacaacgcattattctggcgcctgagctggtcatccgggaatcttcacaaaaaaagcggaacgcctgatacggcgctccgcttttatattacgcaagcagttttaatgattcgcggttgaatgccggaatgtcatccggtgtgcggcttgtgaccagctggttctggcagacgacgacttcttcatccaccacattcgcgcccgcgttttccatatcgattcggattgaagtaaatcctgtcgctttgcgcccgtccaatgctttcgcgttgatgagaagctgagggccgtggcagatagcgaacaccggttttttatcatccataaacgctttggcaaattggacgaaacggtcatccgcacgcagcatgtcaggtgagaatccgcccgggatcagcaatgcgtcaaagtctttcggattcacatcatcgatggacgcgtccactttcacttccgcttccccttgttttcctttgactgtttttcctttttcctgttcaattacggttaattcatgacccgcatctttaaaagctttcgcaggttcagtatactcgacatcctcaaagtaatccgttaatacaactgcaatttttttacccatagttactacctcctgcttgatgaagtctacataaatccatgtaccccagccacactaacatcaaacataggtaacgcgtttaccgcccgcctgttttacataggtcattatcctcattttttatcttttcacaagaatcatcatgaaatctatataaactttcacaaaatattcttacaatggtactgcatgacaaaatttgttgaaaggtggagaacaggtgagaatacagaaaagacgatgcagcgtcaatatgacactccgtattctgctgcccctagttatgatacttagtctgatcctcccaacatcacccattaaagcagaagaaaacaaatcctccagtgtgaatctcagcattttagccacaactgacgttcacgctaacatgatggactacgattactacagcgacaaaccgacaacggaattcgggctggcccgaacggctcagcttattgagaagcacaggcgcgaaaacccgaatacggtgcttgtcgataacggagacctgattcaggggaatcccctcggagaatacgccgtaaaatatgagaaaaatgatatcatttcaggcgcaaaaacccatccgatcattgaagtgatgaacagtctgcattatgacgcaggaacactcggcaatcatgaatttaattacgggcttgaattcctggacgggacaatcaaaggcgctgattatccgatcgttaacgccaatgtgaaaacagtaagcggcgaaaaccgttatacgccttatgtcataaaagacaaaaccgtcacggatgaaaacggcggcaagcatcagctaaaagtcggctatatcggctttgttcctccccagatcatgacgtgggataagaaaaatctcgaaggccgcgttcaggtcgaggacattgtggaatccgcaaagaaaaccgttccgaaaatgaaagctgaaggagccgatatcgtcatcgccctcgcccacagcggcatcgaaaaaaaagcgcagtcttccggagcggaaaacgccgtttttgacctggcaacgaaagtcggcggaattgacgcgatcgtatcgggccatcagcacgggcttttccctgatgccgaatacaaaggcgctgctcaattcgacgtcgataaaggcacgattaacggcatccccgttgttatgtcaagcagctggggcaaatatgcgggcgtcatcgacctccggcttgaaaaaacagacagcgcgtggcatgtggaagatgcaaaaggcagcatcgagccgattgccggcaatgtgaattcggaaaacgaaaccgtcgtcaataccgtcaaaaaagcgcacgaaggcactttgaaatacatcagagaacccgtcggccagacaaaagccgatatcaacagtttcttcgcccaagtcaaagatgatccgtccattcaaatcgtaacggatgcgcaaaaatggtacgccgaaaataagatgaaggatacggagtacaaagatctgcctatcctctcggcgggcgccccgtttaaagccggcgggcggaacggctcaaactactatacaaacatttccgctggcgacctcgccatcaaaaacatcggcgatttgtacctgtatgacaacacggttcagatcgtcaagctgaacggaagcgaagtgaaagactggctcgaaatgtccgcggggcaatttaatcagatcgatcaggcaaaaggcggcagccaagcgcttttaaatgacgcctaccgctcatacaattttgatgtcattgacggtgtcacctatcaggtcgatgtcacaaaaccggcgaaatacaacgaaaacggaacagtcattcatcccgatgcaagccggatcgtcaacctttcttatcaaggaaagcccgtcagcgccaagcaggaatttctgatcgtcacaaataattaccgcgcttcaggcggcggaggattccctcacttaagcaatgacaaaatcgtatactcttctgccgatgagaacaggcaggtcttaatggattacatcatccagcagaaaacgattaatccgcaggctgatcataactggtccatccttccggtcaaagggacaaatctgacatttgaatcttccttggccgcaaagccgtttgccgaccgcgcagatgacgtcgcctatatcggtgaatcacaaaacgcgggctacggacagtacaagctccaattcaaagatgatgaaccgggcacagatccgccgaaagatgacgcatggaaactcaccgttatgcatacaaatgacacgcacgcccaccttgataacgcggcgaggcggatgacgaaaatcaaagaaatcagaagcgaaaccgaccgcagcattttgctggatgcgggagacgttttctcaggcgatctctatttcacaaagtggcaggggctggctgatttaaaattgatgaacagcatgggctacgacgcaatgaccttcggaaatcatgagtttgataaaggtccgggtgctctcgccagcttcttgagcggtaacgggagcgcgtctgacccgtccgggaaatacaattttcaagcacctgactttccgctcgtcagctcaaatgtcgatgtgtccaaagagtcaaaactcagaccattcatgaaaaaagcagacacatttacggcagggaaaaagaaaaaagcaggcatctatccatatattctgcttgatgtaaacggagaaaaagtcgccgtattcggcttgacgacagaagatacgtccgtcacatcaagcccgggaaaaagcattgtctttcatgatgccttccaatccgcacaagatacggtaaaagaaatacagaacaaggaacatgtcaataaaattatcgccctgacccatatcggacatcagcgtgatctcgatctcgccaaaaaagtaaaaggcatcgacttaatcgtcggcggacatacgcatacgcttgtagataaaatggaaattgtcaaaaacgaagagccgaccatcgtcgcccaggcaaaagaatacggcgaatatttaggccgtgtcgatgtcgcatttgacaaaaacggcgtcgtcctgccggaacaatcctctcttcaagcgctgccggtgaatgagcagacgaaagaagacccggatctgaaaaaagagcttgatccgtttaaaaaagagctcgtctcagttaaaaatgaaaaagtcggttcaacgaaggtcgcacttgacggccggcgcgagcatgtccgctccaaagaaaccaatctcggaaacttcatcgcggacggcatgctgcaaaaagcgaaggaagcggccggcgcccaaatcgcgatcacaaacgggggcggcatccgcgcgggcattgataaaggagacatcacactcggcgacgtgctgaatgtaatgccgttcggcaacacgctttacgtcgcggatttaaccggaaaacagatcaaacaagccctggaacaaggattaagcggaattgaggctcaaggcggcgccttccctcaagttgccggtttaacatacacgtttacactgaataaaaagccgggacaccgtgttcttcaagcttcggccgtacaggatgacggcagtgtaaagccgatttctgataagaagacatacagagtcgccaccagtaactttgtcggtgaaggcggagacggatattccgtctttaacgaagcatcccataaagaagaccttggctttgccgactatgaggtcttcgttgagcagcttgaaaaagcgggaaaagcggtggaaccgaaagttgacggccgcgcgcaggaagtgtacctgccgacaaaacaaaaaaacggttcgtggacgcttgaagatgacagcgcatttgccgtctatgccaaaaacgccaacacgccgatcgtgtattacgataagaatgacggcgccaaaaagccgattgatctcagcgtgaccaaaaaacaaatcggcctgttaaaggacagaacatcggattcttcccttacgatcctgcatgacaagttcagcatgaaaatgccgatggcaaacgccgcttcagctgatacacgattcggcgtggcgccgaaaggaaaagttagcggggcgctttcaaatgtatacgactttacaatgaagcagaaaaacaaagacatcaaaacattcaaagcgccggtaaagctcaccctgcgcattgagaatatgaaaaaggcgaaacagcccggcatttatcatgtagaccggaaaaagaacgtctatacaaaaacagacaacggttcggtttcacacgatctcgtcacgggctatacaaatcatttcagtgaatacaccatattaaacgcaaacacgaagagcgcgccgccgacaagcggagatcacggctccggaaagcagccaagcggacaaaaaccgtcatccggccctgcgcaggacggagtatcgccgggcggcctgcttcctgatacagccacaacgatgtattccatccttcttgccgggttactcatcagcgcgctcggaacggcactgtatctgtaccaaagaagaaaagcaaaaaaagtgaacgaagcataaaaagaccgcttttatcgggcggttcatcccaagagctctcctgatctgatatcaggagagctttttctgccggtccccctctgagtcgacagccgtacggccgagtgataaaatatgaacgttattcgcgaaagactgcatccgcatcgtttaacacttcacggcggagcctctcttttacacggcgccgcctgtttggaggactttttttgaagattacaggaaacaaacgaaaccgcatgtcttacaagaaaaagctgttttacgtgataacagcgctttgttttatcagctcgatcatttttgtcactcacaacgcttctttttatgagcggccgattgccagagtgacgaaaacaactttggaacaccaggcaaacgtacaggacatgcataaaaacaaagataagattttcaatcagacgatcactgccagacttgaaaacggcagtcagaaagggcagctcattcatttgtccaatcagtattctttatccggagcgaatgatcagaaatattcgattggcgatgaagtattcgtttctattgataaagggaaaccatcaaacaaagatatatcgggaagcattatagataaaaaacgggataaacagcttttgctgatcgcttgggttttcatcttcaccttgcttatcgtcggaaaaaaacaaggcttcttttcgatcgtcagcctgatgtttaacgccgttttactgtcgtttgcattagatttgtacaggaagcatcctaatatagggttaatttttatctgcggtatctgtattctcatctttacggtcatctcattgctgcttgtcagcggttttcacgcgaaaacatatgccgccatagccgcgacgctcgcaggcactttcgtttccctgctgattacgtatctggtgatgctggcaaccggagagaaaggtctcagatatgaggaaatgcagtatttaacccgcccttatcacacggtgtttatggccggggtatttatcggatcactgggagcggtcatggatgtagccattaccatgacgtcatctgtcttcggattatatgaagaaaacaagggtatctcattacaagctctcagacgttccgggatggagatcggaaaagacatcatgggagcgatgaccaatattctgttttttgcttatataagcggctctattccgatgatgcttttgtatttgaaaaatgattccccgataggattcactctttctatgaacatttccttggaaatagccagagcattggccggggggatcggaattgtattaaccatacccgccagtctgtatgcttctgtcttttttattaaacaaaagaaggcaagctcatgaatgtcatcgtaattctcgcggcgattttatttctattaatggtcattatcggcggaaaaaaaggagcgaggtcttttattgcgttattcttaaatttcggggttctctttctcaccattattttcatgacagatccgcatatcaatccgattgttttaacattgctctcttccgccgtgatttgcagcattactcttttttatattaatggaggaaacgtcaaaaccgtaaccgcctttatttctgcgatgctgaccattgcattgctgctgttttttattatgtccgtaacaaaacatacttcgattcagggattcggtgaagaagaattgggggatatcggcatattcacactgtttgtcggggtggattttgtgaaggttaccgcagctatgatcatcatgggcacgattggggcgattactgatgtcgcgatttccattacttcacccatgcgggaaatttacagtcataatccgtccatgagcagaaaagaactgtacacattcggattaagcatcgggagagatattttaggaacgaatacgaatacgttattctttgcttttttcggcagctatttggctttaattatctggtttaaagacttatcatactcagctgaaaaaatagtgaactcaaaagtattcagtgcggaagccgtcaccattctttgcgccggaatcgggatcggcatcatcattcccgttacgtcctggatcaccgcctgttttttagcaaaaccaaataaacattaaaagctgccgggacacgcccggcagctttttttatcttatacccactttacaacgtcttttgaggcagatcttgttttcgggcgcggttctctgacacggtagccgaatgcggccatgacagagatgtcgaaacttccgttttccagaagcccttcttcttcaagaatccggtggatctctttgtagttgaagccttcaacagggcaggaatcgatgccgatctgcgcagcggctgtcatcatattgccgagggcgatgtaagtctgtttggatgcccagtcaaacagcgcgcgatctgattcaagcagattgaaatcatttttctggaagtcttccgttttgctgatatagccttcatacatatcttccggcatttttttgacttcccgcaagtggtttttgacatagtcggcgtcaaaacggatatcctttgccgtccgggcaagcagaagtacgaaatggcttgcggtcggcagctgcttttgcgccccccatgtgaactcgcggagtttttcacgaagctccggattttgaacgacgacaaatttccaaggctccaaaccgagtgagcttggggataatcttcccgtttctaaaatgaattcaaaatcgctttctgaaatttttttctcaggatcaaattcctttgtagcgtgtctgaattgatacgcttcgatgatctgctgttttttatctgacattcatgatctctcctttttatctcgttatgtactattgtagccattatttttgaaagtaccagtacgcacatttttgttggatagtattcattttgatactgacaaaaaaacgggctgccgcggcagtccgtttttatttttctcttctcgcaaagtcgacgaaacggaatttatcgagcctgtgccggctttccgtgtactgaaagaggctggtatcctccaaaaagacgcggtttttcacgaccgccatatggctgaacccgccgagatccaaatacttccggtcttcctcccccgccggctccacgacaatttccttttgcgcgtagctgatggacaggccgagctctccttcgagatactcatagatcgaatcttcacaaatcgccttcgttaatagaggcacatgttttttcacaaagtaatccttgtccaaaataatatgttctccgtcaatccgtcttgatctgacgacttcccacaccttttcatccgccactgtaccaagctcttttgcggcttctgagggaggcaggatcagcccgagacggtgaacctccgttcgcgtctcttttccgagcgtttccgaaagctctttgaagctgatcaggcctgagacgggaaagcgcattttttctctgtctaatatgacggagcctttgcctttgattttctggatgtagccgttttgcgccagcatattgagcgctttacggacggtttctcgtgatgtgccgtattgatcgcataaatcattttcagacggaagaacgtcttcagccttccgctggccgctttcaatctgccgcaccatatctttatagattgtgatatatttattcactttcattcatgaccacccagattagtgtatcacgcttttgtcagatgataaacgatcgattcatacggacggagcgtcaatcgttccggccgcccttccctcggttcatcattcgtcagcagcaccgtaaaccgccagccgtccgtgtctttaagcggaaccgtaaagtccgcttctttcccgtagaagttgttgatgcacagaagtttttcatccttgccgtgtctgacgtacgccagaaccgccggatcatcttcagcaagcagctcaaacgttccttcagtcacgatgtcatattcctttctgagcttgatgagcttctgataatggtagaaaattgaatccgggtcccgcaaagccgcttccgcgttaatgtcccgataatcatccgccgccggaatccaaggcgttcccgtcgtgaagccgccgttcggcccgctgttccattgaacgggggttcttgcattgtctcttgatttctcttttaaaatggcgataatgtctttttctgacacgccttcttccttcatctttttgtaaatgttcagtgattcgacatcgcggtatgagccgatgtcatcgaacttcggattgcccatgccgatctcctcaccttgataaatgtaaggcgtgccctgcatcatatgaatggccgccgccagcattttggctgatttcgtccggtatacgccatcgtctccgtatctggatacggcccgcggctggtcatggttgcaccagaataatgcgttccagcctccgccgttttgcatctccgtctgccaaaacgctaaaatccgtttcagcttcagaaaatcaaacggagcgagcgcccatttttcaccattcggataatccacttttaaatgatgaaagttaaaggtcatatcgagttctttattttcagggtttgtgtaccggatgcagtggtcagccgttgtcgaggacatttcaccgaccgtcatgctgtcatatttcgaaaacacttcccggttcatctcatgaagaaattcgtgcacgcgcggcccgtccgtataataagggcgcccgtcacgaccatcctcggcatcaggaaacgattggtctttagaaatgaggttgatcacatccagccggaagccgtcgatcccttttcggaaccaaaaatgcatcatgtcgtaaacctgttttctcatctcttcattttcccagttcaaatcggcctgcgacacatcgaataaatgcagatagtgctggcctgaggccggatcgagctcccaagcggaaccgccgaattttgattcccagttgttcggcgcccggccgtcttccttgccgtctttccaaatgtaaaaatcccgatacggactgtcgggtgacgaaaccgcttctttgaaccactgatgctcgactgatgtatggtttacgacaagatccatgacgacctttattcctcttttgtgcgcttcatcgagaaggcgttcaaaatcctccatcgttccgtattcttcataaatggtgcagtaatcgcgaatgtcataaccgttgtcattctgcggcgaatcgtaaatcggcgtaagccaaatgacatcaatcaaaagcttctgcaaataatcaagcttctcgataataccgttcagatcaccgatcccgtttcccgtcgtatcattaaagctcttcggataaatttgatataccgctgcctttttccaccatggtgtgctgtctgttttcatttttcttcaccgcctgtattgttttgaatggaaagggaaaagggacagcctgttagaaggcgccccgcaggttttctatttttgccgtttcagccgcgcatacccgtatgttcccgcaaacgggagtatcagcacgatcagcattccgatcgcaaacggaccccagtaccggctcataatggagaagatccccgggacgccgccgactccgaccgagcttgcgagaacgcctttgacggagatgaacatccccgcaatccccgagctgatcatggcgatcacaaacggaaatttgtaacgcagattcacgccgaaaatcgccggctcggtaatgcccaaatatgcggaaatgccggccgtcagtgaaagcccccgctgttttttatcttttgtaatgagcatcatggccagagccgccgatccttgagcgatatttgataatgcgagcatcggccataaaaatgtgccgccgagctttgatccgattaattgaagatcgaccgcgagaaacgtatgatgcatccccgtgatgacaagcgccgaatacagccctccgtacagcaggcctccgatggcggagaattggccgaaaacggcaatcaatcccgccgtcagcgcgttaccgatcgcaaaggtgatcggaccgatgataacaaaggatagaaaaccgatgaccaaaagcgtcaccggcgcgacgaccaacagctgaatgccctccggcgtccgtttcgtcaaaaagagctcaagcctggcaagtaaataagacgccagcagaatcgggagcacctgaccttgatacccgactttctgcacctcaaggccgaacaagttccacaccggaatatcgccgctctgctcggcggccccgtatccccatgcgtttaacagatcaggatgcaccagcatcagcccgagcacgatgcccaaaagcgggcttcctccgaaccgcttcactgccgaccagccgattaaagccggcagaaaagcgaaggccgtccccgcgatcagattaatcatattggcaagatccgcccattgcggatacacttgaacaatcgatttcgtgctgtaaaaaatgccttccgccgttaagatattgttcagacccattaaaagcccggccgtgacgatcgccggcaagatcggaataaagatgtccgcaagcgttttcatagcacgctgtaaaggattcattttttgcgatgccgccttcttcacgtcatccttggacgcttccccgatccccgtttccttcactaattccgcatatactttgttgaccgtcccctgcccgatcacgacttgaaactgcccgtttaccgcaaaagatcctttgacaatgtctattgcatcaagcattttttggtttaccttggtttcatctattaatgcaaaccgcaaacgcgtcacacaatgagtcgccgcctcaatattttcgattccgccgacagcttcagcgatctgccgcgcagcccggttaaactcacccatgccaacccctccgtaaccgttttcattttgtctcaaaaaacttgtatatacatgtttatgactctattgtaatgatgtatatacatgtcgtcaatctatttttatagcgctttcatcacaaatatactgcgaaagaccctgaaacaaaaaaagccccgccggaaccgggccttgacttcttgtttggtcgggaacatgtccgggcggaattcacaacaggagcacaaaaagcatacagtactgtacaactaagttaaagaggtgtgaagagatgccatccactgttatcaacctgtactatttgaagattaacagtatttctggcaacggatctattacgattggggaagcggcatacaacagtcccaccacaaataacaaatcacaaggactgaactcttcattcggcgatacgtcacctatagaatcgatgatggagaacttgttaaatgatcctgatgtcaacgaccagacagccatcggaaccgcagataccgcaaatattacgccggtgccgcccattatagattaaaggggtttttatgaatgccttaccaaattaacgtcgtcaatataaaagtaaacggagcaacgcaaaacggaaacgtcgatatcggtcagaccgtacaaaacagccacaccgccaacagcaaatttgtcggcgcgaacttttctttaggggatttttcgccggccgccggatgtttgaattcgggccatcttgaccctgacgtgagcgatcaggatcagatcgccaacccgtcaatgccgatcgcaaatcaaatatagggaggttctgccgaagtggatatcgaaaaaatgagaaagtggcttgagattacgaacgagcacaagcccagcgacttttggaccaatgtcctgaaacggaaatctcccgaagattttttctccttacaaaaaaacaccctgacttatgatatttatcaggatgaacagcacacatttgtcattgtggaaatgcccggcgtttacgaagaagaattgacattgaggctgctgtcaagaacacggctgcatataagaggaaacatcacacccctttttccgaagaacatgggcgtctgccaaaaccggtattacggggaaatcgatgagacgattgagcttcctgaaccggctgagccccacctgttacaggcgcagtgcgtaaacggcctgctccacatttcctacccgcgccttatggagcacattccttttcagaaaaaaatataaagagccggcttacgggcggcccagccgtctgtacactttctccttataatgagaagatgcgggttttgagaacatggctttctcctccgtcagtttgtcgagtctgacttgtttttccgtccgtttgttccgcaggtgatcccgctcctgttcattgcggcacttggcgatcaaataatcgagcgtcatcagctctttcttcagcgcgccctcatcctcggcgatcccggcgttttttaatatgcggtagcccattctgagcgactccggaagatgtgcggcatcgtctttcggcaggggctttcccattccattgatgccggcgaactctccatccttaatggcgcgcttgattttatcttcagccacgatatgcgcaatatccatcactgtttacctctttcttcaatagaatcgggtgtgatcatacggaaattcacatcccagtttgtgccatttgtgttttttaaagctgtcattcaacagatcaaccgccgctgcgacagcgtttttcgccctttttccgatgagccttttccaccttttctatttgctggtttcatggtatattgattacgttcgttttttctatcgttccgtgtaaaccgtgatcggaaaaaaggagtgtaacaatgaaaacatttataaaagaaagaggacttgccttcttcttgatagcggtcgtgttattgtgggtgaaaacatatgtcgcttatattttaaactttaacctcggcatagacaacacgatccagaaaatattgctttttgtgaatccgctgagctccagcttgttctttcttggatttgggcttcttttcaagaagaaattacagcagacagccattattgtgattcattttttattgtcttttttgctttttgcaaacatcgtctattatagattctttaatgatttcattaccatcccggtcatgatgcaggcaaagacaaacggcggccagctcggagacagcgcgttctcgttaatgagatggacagacgccttctacttcctggataccgtcattttgattattttggcccttaagatgaaaaaaccggctgaaaaaccggcgaagaaatcattcagaatcgttttggcttccgccgtgcttgtgttcctgatcaacctcgccgtcgcggaatccgaccgtcccgagcttttgacacgctcatttgaccgaaactatctggtgaaatacttgggcacgtacaactttacgatttacgatgccgtgcagaatgtgaaatcaaacagccagcgcgcgcttgccgattcaagcgatgtaacggatgtggaaaactatatgaaggccaactatgacgtgccgaataacgtctacttcggaaaagccgaaggaaaaaacgtcatctacgtctcattagagtctctgcagtcctttatcattgattacaaaattaacggcaaggaagtgacgccgtttttaaacaaactggcgcacgataatcaaacattctactttgataactttttccaccaaacgggacaaggtaaaacatctgatgcggaatttatgatggagaactctctgtacccgctttcgcaaggttcggttttcgtcaataaagcgcaaaacacgctgcagtccgttcctgcgatcttaaaaggcaaaaagtacacgtctgccgctttccacggaaatacgcagactttctggaaccgtaacgaaatgtacaaatcggaaggcatcgataagtttttcgattccgcttattatgacatgagcgaagaaaatacgaaaaactacggcatgaaagacaaaccgtatttcaaagaatccatgccgctcttaaagagcctgccgcagccgttctatacgaagttcattacgctgtccaaccacttcccgttcggaatggataaagaagacacggacttcccggcgggagactttggcgattcagtcgtcaataattacttccagtccgcgaactatctggatgaatcaattgaacagttctttaatgacctgaaaaaagacggcctgtacgataagtcgattatcgtgatgtacggagaccactacggcatctccgaaaaccataataaagcgatggcgaaagtgctcggcaaagatgagatcactgaatacgacaatgcccagcttcagcgggtgccgctctttatccacgctcccggcgtgaaaggcggccgcaatcataaatttgccggtgaagtcgatgtcgcgccgaccgttcttcatctgctcggcgtcgatacgaaagattatctcatgtcaggttctgatatcttatcgaaagagcacagagaagtcattccgttccgtaacggagacttcatctcgccgaactatacgaaagtgtccggcaagtattacgatacgaaaaccggaagacttttagatgattcagaagtcgacaaaaaagaagactctctcgtcaagactgagcttgaaatgtctgataagatcatcaacggcgatctgcttcgtttctatcagccgaaaggcttcaagaaagtggatccgtcacaattcgattatacgaagcgtgaagattcctcagcagacgatcaaaaagaataaacaaaagccagatcattgatatgatctggcttttttatgttcagctcccggcggcggccatagtgcgcttttgcaggctgtcggaaagaactgaataagcgattactttctttttctgctgcttgacgacatctacatgatcttcgtagctgtatacaaacaccgtcacatctttttttccttttctcgtcttaatgacaagcggatcggctccgttttgcggatgaagataacgctcttcatcccctgggtatatataatgccgttcgataaacacggcttcgttaaaatcatcaatcacccgtcgtttgtcttcgccttccagacgttttcccccgagggaaacggcagcggactcgtcactgagctttgaatgggtttcaaacttgcggaggatccattccaccgctccggtaggaaggcatgtcagcacaatcttaatcaggcttatgacaacaattgaaacaactgcaatccatgtcaccttacatcatctccatacttgttctacatgaatcttaacatagaaggaaacattgttttttgtacattatgtgaaacttgatatatgttcaaaaaaaatccggatcacataggtgatccggatttttcaagtctgcttctgatcgtcaaggcggacggcctctctcagctcttccgcgacaaattcgacgttcggcccgataatgacctgcgccgttttattccccgttttgataaccccttttgctcccgcttttttaagcgccgcctcattaatgagagacgtatcctgcacggtcagcctgaggcgggtcgcacagtgatcaatcgtttcgagattttgcctgccgccgagccccttgagcatggcatgttcttcgacggaaccggccgtatcttcactaagcacttcttcctcttcctcatcatcttcccgtcccggcgttttcaagtttaacgttttgatgagcatataaaagacggcaaaatagatcaccgcataacaaagcccgacaacgagcagcaaaagcggtttttcggcaatgccgtagctgaggagataatcgatcgcccccgccgagaatgaaaaacctgacctgattccgagaacattcacgataaataaagagaacccggttaatatagcatgaaccccgtacaaaagcggtgataaaaacataaatgcaaattcaatcggctctgtaattccggtaataaatgccgtcagcgcgagaccgatcatcattccggccgtcgctttgcgcttacttggcttagccgcggcaatcattgccagacaagcggccggaagcccgaacatcataatcgggaagaatcccgtcatataagtccccgccgtcggatccttcgcaaagaagcgggccagatctcccgtttttccgtgaaaatcgccaaactggaaccaaaaaatattattcaacacatgatgaagaccgaatggaatcaaaagccgattaaaaatcccgtaaatccccgcgccgatcccgccaagcccgatcatccattccccgaaggacgtaatcaccgactgaatcggcggccacacaaatccgaagatacccgccaaaataatggtaatcagcgccgttacaatcggaacgagcctgcgcccgctgaaaaacccgagatattcgggcagcttcgtatccttaaagcgattatacgtgtatcccgcaattaaccccgcgataatccctccgaaaacggccatattatttgtcgaattgattgattttacagccgcgtccagcatgatataagaaatggctcccgacagagcggcggccccgttgctgtctttcgaaatcccgatcgcgattccgatcgcgaaaatcagcggcagatgatcaaataccgcggtccccgccgcgtaaatgaacggaatatttaataagtcctctctgccgatggccaaaataataccaacggcgggcagaacggcaatcggaagcataaaagactttccgagtttttgcaaaaattgaagcattttacccatcccccttcttttttcttaaatataccacataagttatctagtgatctataccaattttccttcatttattcacataaggcttgttggttttctatttataaaccagttgtggtaagcttgaatcagatgattaaaaatagaaagcgggaatgacaatgattgtaacgaacgatcaagaattagaaggccttaaaaaaatcggcagaatcgtcgcgctggcgcgtgaagaaatgaagaaaaaagccgagcccggcatgagcacgaaagatcttgacctgatcggaaaggcggtgcttgacgagcacggagccgcttccgctccggagaaggaatacgatttcccgggcgtgacatgcatcagcgtaaatgacgaagtcgctcacggcattccgagcgcctctaaaatcttaaaagccggagatcttgtcaatatcgatatttcggcggagttcggcggtttttattccgatacgggcatttcatttgtgctcggagaaggcgatgaacgtctgcaaaagctttgtaactgcgcggcatccgcatttcagaaaggattggatcaggcaaaagccggcaaacgtcaaaaccagatcggcagagccgtctaccatgaagcccgctccaacggatttaccgtcattaaaacgctgacgggccacggaatcggcagaaacctccatgaagcgccgaaccacatcatgaattactacgatccgtttgataacgcgctgtttaaaaacggaaccgtgatcgcgcttgagccgtttatttccacgaaagcggaaacgattgttgaagcgggagacggctggacatataaaacgccggataaaagccttgtcgcccaagtggaacacaccatcgtgattacaaaagacaaaccgattattttaactgcattgtaatgtttcatctccctcccgaacaggtatacaacaactaacccgaaggagggagacgcatgaaaaaagataaagaaaaaatcaaaattgaaaacgaaatacacgccatgcacggcgtaacgaaacagcagattttagaggatttcgaggaatttaaggcgtaccttcatcagaaaatttccgccggaaaaaaactgggtctggatgacagcaaaatcatcaaaagcgccgccatcctcggggactatctcgccaaacacgaggagccccgcaatgcggaagaaaaactcttacaagaactgtgggacatcgcggatgataatgaaaaacagcatttggcccagcttctcgtcaaacttgccggacactgatacagtgcccggcttttttatgctccgttataagagttgtgctacactggacatatgtctgtgaaaggagccatttttcaacatgtggtttattatcttcgggtttattttctttattgaaagcatcattctcaccgtttacggggtgaagaaaaagaaggggatgctgatttatttcggcgtcgttttcggaatcatgacactcggaacggtgctgttaaaattaaccggccattaagcatgaaaagaccgccctttacatatatatgtaagaaagctttacatctctgaatcgaaaggctcagtttttgcattatcccttttcagcgtctttttatagatgttacaatgccaaaagtttggcaaaaactgaagaaacctccccagcgggagaacggagaaaggagttttctgacatgcattatggcagtaaaggctggtatgtagaagagttaaagaaaaaaggaattacccactatgaaggaagaaagcttcaaagcttcaaaaagtacttccttgccaatctgctggaaacaaagaaacaagcataacgtaaatcagccgtgctgtcagtgcagcacggctttttttctatacattagtgagcctgtccctttttttaaggaaggactccctccagctttctgacagcgcttcttcccgcagtatttcttcaatcgctgacagattgtctgaatcacggtatttcacttcgttcgcataccagacggaaatgctttctttgcctctcgacagacgcttgaggacgggacgcggatcgacatatccttcttcaagcaccctgaaataaaagccggtaaatcccgtctgctgtacacggagcaccatatctttgatgccatatttgagcgcgagtttgacgcagggctggcgcggctggcttacttgaacgacggcttcacccagctgaaagatgtcgccgatccacacgtcttgttcggccagtcctttgaccgttacattctctccgaacgcggcggcgggaagttttctcgcgagcgttgtttcccaatatgaataatgctcggcgggatacacgcacaccgctttatcgggacctccgtgatgcttcagatcagcctgcccgtccccgtcaaaatgggttttatacagcatgacgggagaatctgcgggccgcttgatgatgcctgaattgatttgtctgccggcaaattcatgaattgcgggctttccgagattgatagataagacagaatagtcttgcgtcatctcgttcacatcctttgcgaaatatcctacctttcctttatcatagtaagaaaaaggtggtttttccatgcttcagtatcatatgattgcagacggccgggttcagggcgtaggttttcgctacttcgtccagatggaagccgacagacataagatagccggctgggtaaaaaaccgtgatgacggccgggtggaaatccttgccgaaggccctgaagagtcgttaaaacaatttgccgaagcggtcagaaaaggcagccccttctcaaatgtcacaaacgtaaccatcgaagaatcacaccgtctgaaagggtaccgcaccttttccatcagttactgataaggcttgtcctgataaaaataattcggcttcacaatcgtattgtcatatgatttatggaaaatgtgggtggaagccggcgagatcggcggaatcagccaggtccagtcgcccgtcagctttctgcccgcgtcttgttcctgttcttcaaagcgtttaaattgattcgcggccgtatggtgatcgacaatgctgacaccgtgttttttgtatgaatagagcactgccttattcagttccaccagcacctgatctttccacaggtcggtattcaggctggcggaaatccccatgaccgaagcggcttttttgagcatatcataccgcttttcgtcagcaaggttccttgcgccgatttcagttcccatataccatccgttaaaaggcgccgcgttgtacgacagtccgccgatttcaagcctcatatcggcgataatcggaaccccgtaccacctgagatttaaatcggcaaactcttcaatatccggatgggtgatcggcacttctttcacgagcgtctgaggcaggtcataccagaccggctgcccgtcccctttcatccggaaaagcagcggcagaatatcaaattcggtccgcttcccgcgccagccgagtttttcgcagacagccgtcagctcatatgatgccggatcaccgactcttcctttttcagtctcatatcccgcatagcggatgagctggtgattccagatttccacttgtttctccccgttcttctcaggagggaaaatcgtaatcgtcggtttaatttttccgccgttcgtggcgatttcaatatgttcaaataatgcgtcacgcacctcttctttcgtgttcacattgcgccggtcaatgacgttcagcgattgccagaacagacgcccgatacagcggttgctgttgcgccacgccattttcgccccgtgttcaagctcttccgccgtatggacgtaacttcccgtccgatctatctcatcttttatcgcgtgcagtcgcgcgttgatttgcgattccattccgagttcgtgatagcagacatcaataaaatccttcgcctcatcccaaagtatttccgtatgtttcaaaaaactctctccttcaatttacatctgtttcccattgtatcgtttttaggtgtgaacacaatggtttttttgtatcatactggaaactgcgaagaaaaaacacctgtgattttcgcaggtgttttacaaaacggaatgcagtttttcagccagtgtaagcaaatcctcacggtagttttttcccgtcatcggaattccgtgacccgtcaaaagcgcttccggctccagttccgccaatttctgaacggatgcggccgccgtctgcgtatccgctgtaaaataggcgggcggaccgtgaagctcttgcttttgaatgacaacgtccgcaagcgattcctgttcaacagtgatcacggcatcaccggcaagcagcacgcggtctttatcccggaataatgaaatatggccgggtgtgtgaccgggcgtatgcacccatttccattcttcaagaaacggaacggtaccgtctgaaggcagtgcctgaacggacggaatgcggatcgtatggcgcggaaacagcggtgacagctttgcgacaagcccttttttcgcatcgggcctggcaggcggataatccgctttccccgtgacgtacggaagctccttttcatgaatgtaaaccggcacattccaaagctcaagcagttcttcaatcgcaccgacatgatcaaaatgaccgtgtgtcaaaatgaccgccttcagctcatacccctctttgaaccggcgtttcatttcatttgtaatcatctccgacgattgaggcattcccgcgtcaaccagaatgatttcccgcggagctgagggattttcgataaagtaaacattcgcaatctgcacggtcagtccgtaaacgccgtccgccgctttaaaaccggcgccgcttctcactgaaaaaagcggcataaacggatcactcatcatggcacctcctctgatgcctttagtgtgcgacgaaccgggtgttttatgttaaaaaatcgtgattgcgccgatgatgagcgcaaaggccgtcatgacgataacggcaagaaccgcccatttcatcgcaaatttctgatgttcatcaatggtgaccccggcaagcccgactaataaatgcgtcgacggcacgagcgggcttaacatatgaatcggctggccgataatcgaagcgcgggcgatttccaccttatctacaccgtacgccacggcagtctcagataaaatgggcagcacgccgtaaaaataggcgtcattaggcatcagaaacgtaaagataccgctcgttaaggcaacaatcgccggaataaaacctcccatctgttccggaataagcgatacgagggaaatggccatttcatcaaccatcttcgtccccgttaaaattccggtaaacacgcctgcggcaaaaatcatcgaaccgatcgcaagcacattgctcgaatgggctgaaatgcgctccctttgatcattaagtttcggatagttgacaatcagcgcgatacaaaacgcaatgatgaacagcacggttaaattcacttttcctgacactaaaaatcccactaaagaaagcgttaacagtaaattgaaccaccacagtttcggccgcttccattcatcttccgcagccgcagccgtttcatttgtatgggacggctgctttaattcgatcaccccgagccgtttcctttccatccttccgagtacataagcgaccacaatcatacacaccattccgctcgcgatgacaggcagcatcggccccgtcagctctgccggatcaacgccgagcgcactcgccgcacgcggcgccgcgccgccccatggaatcgtgttcatgatacccatgccgaccccggcgattcccgctaaaataatcggacggattccgagcatgatatacaaaggcagcattgcgcttgtcgtaatcatatacgtcgtcgagccgtctccgtccagtgcgacaagcatggtcaaaacggctgttccgactacaattttgagcgggtcgcctttaaccagctttaaaatacgcgacaccatcggatcaaataaaccggtatcaatcataatgccgaaataaagaatcgcaaacataatcatcactgcgatcggcgccacctgttcaataccggagatcatcatctcgccgacccggttaaaagaaaacccggcaatcagcgcaaacacgatcggcgttaatacgagcgccgttaacactgaaagccgttttgtcataatcagcaccataaaaacaagcatcataagaaagcctaagattgctaacacagtatgtccccctcatcatgaatacgcttacattttaaaggcccgatcccctttatccgcctttttgctatcttatgagaattggatattgaagtaaatattttggattttaaagatttttaattttttataaccttttcgttcattttgttcatttataaatcaaaagccttccgcaaatatgcggaaggcttatttttcgctgctcatcatctctttataaaactcggtctgctcttctaaaaagcgttttgcgccgctgctgtttttataaaagctctcccaatcccgttttttcaacatttgcttccactccgcggatgaagtaatctgtttcaaagcctgatcccaataggcgatctcgccttcggtcatgtctttcggccccatgatgcctctccagtgcgcaaagacaaacggcaccccctgctctttccatgtcggcacatcgctgaagccggagagccttttgtcagacgtaacggccgccaatgtgattttccctttccgataggcgtctctcgcttctgaaatggtcattgaggcggcgtctatctcgtgactgataagagcttcaatgacttcattgctgcttccgtattgaaaaaagcggatatcaaacggagaaattccggccatttccgccgctctcgcaaaggagagctggtcatcatttccgaggccgggcgcaaatccgatttttatgccgcccggatttgctttaatatcgccgagcagccgctttccgctttttatctttgaatccttcggaagagcgacggtctgccactcttttgcgataatggccaaaggcgtaaaatcagctgccttcagccggctttgtcccaaaatttcattgcttaacagcagacttgaattcatactgatgacatccgtttttcgttcgtttacatatttccagccgctgtctccgcctcctccgggtttatagatgatctttacgggccggcctaatatttgcttccgctctattaccgattgcaaagcttttgccgttacgtcccagcccccttgaggcgctgccgggacgactatttcaaccggcccttcagctgaacggatgcccgccgcctgccgtccgtcaaaagaaaccagcgccgccagcatgacaagaagcactcccaaccgcttcatttctcccatcccttactcatgtgctaaataatatttccgttccggcctgccgataatgccgtactctaattcagcgagcgcttcttcccgagaaacgagaaactcggcgtagcgccgcgccgttgttctggaggcacccattttttctcccagttcttcagccgtcatccctttttgggccgttctgagcgcgtttttgattttttgaagcgtaatcgaattaatcccggtcggcagatcattgtgctgtttttgttctttctgaccgcttccgaaaaacatgtcaatcacggactggctcagctccggctgtgagtgcagccattctcttttttcacggtactgcaaaagcacttctgtaaatttatgtgccgacaccggttttatgacataatgggcaacgcctgatctgagcgcttcctgcagcagccttgtttcggcagaagccgtaataatgatgatatcaacggaaggaaaacggccgcggataagcgggagcagatctgttcccagctcatccggcatataaatatccaatagcagcagatcaggctgccgtttctcaagcagcgatatggtgtctttggcattgattgctttgccgatgacattgaatccatcaagatgttcgataaatttttcgtgaatttgcgctattcgaaagtcgtcctctgcaatcgcgatgttaatcacaccgattccccctttggcctttctttcggtataaacaccgtaaatacggcaccgccgctcttttgctgcgaaatctcaatcgctccctgcaactcactgacggcttctttcagattggctaagccgtatcctctccttgtcccctttgaagagtagcccttttcaaatatcgtttctgttttttcctgaggcacgccgtctcctgaatccgccacttcgatgacgatatccctgccgatatcggtcataaaaaaggatacctcttttttctctttttcggcgacggcttcgaaagcgttatcaataagatttccgatgatcgtaatgagctgggatgaacccacatgctccggcagcgattctaaaaagctgttttcatctattgaaagcttcactttcttctcagacgcctttcccatttttcctaatagtatggcctgaacccgctgtgaatgaatgttttgaaagaggatttcgtgctgttcattctggatggcgtactcttcttttatcagttcaatggcttcattatattctcccagctctaacagaccgagtatcgcgtaaagcttattcgagaattcatgcgtttgcgcccggagatcctccgagtattttttcatttcagtcagcttgttaatcagtttcttgagctccgttttttcgcggaagctgatcaccgctccgtatacttgtccgttctgcttcatttctttcacgtttaagataaatactttatctccggcacgcacctccacgttcggcggtaattctccccctgccaacaccggcatgagctttgcgcccggcatgatttcttttatatgccttccgatcatcggttccggaagattcagcatatcagccgcagataaattcatcatggttaccgcgccttctttgtttacggcgataatcccttctttcatcgcaaggagcatcgcattgcgttccctgtacagcgctgcaatttcatgcggttcaaggccgagtgtatctttacggatgctttttgcgagcgccgccgctcccccgatgccgataagaaacaccaaacatgcaaaatagcctaaatgccgcaaatgcgccttcatatctttttctatctcatcttgtagaaattcgactgtcaccgttccgacgacttcgttatgatttttttcctccaaaataaccggggcgcttccccggacggccttcattccgtcggaaaccggagacccgccgaacatgacggttttattttgcagattttgattttctttcggaatactgcttcgggccgaatgaaatgcaacatgccctttttgatcagtgatgtagacggcgtgcgcgcctgcctgttctttcatttgttcaatgacgtctaactttgtaaaagcctcttgatccgcaagccggaacgcctcttttacgggaggcatatatgaaatggtttttgccgtttgcaccgccagctgttcagcctgcttctgcccttcctttaattgctgaaaggcaaatataaccgtgagcgttccgatgacaagtattaataaagccgtaattaatccggcgattttcatttgcagagagacataaaaccgcttcgcttccaacacagcaccagccgtcctttcctcctaaaatcataccattttttaaatcttcatttctcatttttgagaattttcgcgatctttttctcttgtcatttctttcaaaaagtgcagtctggtataatttccctcaagagagataagaaggatgaactttttataatcgctgcgcaaaaaaagactgacaggagccagtctcgggatgtttcacaacggacgtatattcagttgacaaagtgtttctctatgatggctgagatacatttgaatgaccggaaatatcaatcaattttcctttgacggccaggcgtccttcggttcttaccgccttgtcgcatgtgattaatgtaatctctttatcttttgtctcctgaattgcgtttgcttctatttctgaaatcatggtttttgatgttacagaataaatatagtcttttctaaagtcggtaatcacgatttgcgcacctttttttatgtgtaaaagagggccgaacaataggttctcctgcttcagatggtggcctgccaacgggtagtttccctcgcccattttctgatccggacgcatagttgccgcgccgatcagcaggttttcattggttgtgccttttaaaatcggaaggtctaaatcgatgctgctgatggttatccgtccgattatcggtttcggtttgcgattaaaacttgactgaactgtttccctgaaaccgggcggatgaatggattcaaattcatagtccgcttttttcatgttatttttccgcgcttgttctgcggtcaattccgattcaatttggcttttactgaggtacgcaatcaaacagcctttcatgagaggagaggaaatgagaagcagcccggacaaaataagaacggcaatgatcatttttttaaccatgaagaaaattcctttcttgtacgtcatgcggtgagtatttggtgagaaatgattctctttttaaaaaagcacctgatcgattcttacatgatcaggtgcgattacgtctatctattccttgctttcttctttcttgatacaacagccgcggctccgccggctaatagcagcagaataccggccgtgaccggcatcataccgtccgtatcaccggttttcggcagatttttgcctgtatccgggtgattggttttactattggtatcagggtgatgcccgccttgattcgtttgatgattcggtgtgtctttcccaggtgcgggattttttaatttcttattagaaacgacgacctcaacagcttttgattgtcctttttcaattgtgaattcaattggtttttcgttcagctgatagccgtcaggcgcttttgtttcgataaatcgatactgcccgggcgctaatcctttcaccgtaaaccggcccttttgatccgtcttccataccgccggccgttctttgctgccgccggtgtttaccggatgtccggcagaatccgttatcttgaattcagcaccttccagcaccttatttttatcgtcatgatccacttttgtcagtgttacatcacccggcgtcagtgtattctccgcactgatttcgactggttttatgtcggtatttgtgatcttgaatgaaattggcgtttgatccaaactgtaaagttcaggcgcttttgtttcgataaattgatattcgcctgctttcagtccccgtacaacaatctgtccgtgctcatctgtcgtcagaccttctctcagcactttgccgtttgcatctgtcagattaaacttcgcaccttgcaggactttccgtttgtcaccttgatccaattttgtaagaacaacactgttcttgatgttaactgcagtcagggcagcctgatccggttttccgctgttctcagccttaatcgtaaaccgcacaggggttgttgacagcagataaccatccggcgcttttgtttcaacaaattgatagtttccgggcgccaaaccgccggcgtcaattttgccgccttcttttgtcatcagatcttctcttacggtttttccatcactgtcaatgattttaaatactgcaccgtctaaaacgtttccgtcttgatccttcttaaccagctggacagagcctttatagttgacaaaggtgccggtctcagacggcttcggctttccttccgctgtttctgagatggtaaactcttttttctccgtatttaacacataaccgtcaggcgctttcgtttcaatgaatgcgtaatgaccgggtgcaaggccggatgtttctacttttccgtctttatctgaaaccagatcgtcctgaaccgtttttccatcacggtcgacgattttgaagactgcaccttcaaggtttcggccttccgcatcttccttcgtcagccggacagagcctttatagttgacggccgttcctgcgtcagttgactccggctttccttccgctgtttctgagatggtaaactccactttcttcgtatttaacacatagccgtcaggcgctttcgtttcgatgaaggcgtaatgacccggggcaaggccggatgtttctacttttccgtccttatctgaaaccagatcgtcctgaactatttttccatcactatcgacgattttgaaaactgcaccttcaaggtttcggccttccgcatcttccttcgtcagcaacacagagcctttatagttgacggccgttcctgcgtcagttgactccggctttccttccgctgtttctgagatggtaaactccactttctccgtatttaacacatagccgtcaggcgctttcgtttcgatgaaggcgtaatgacccggggcaaggccggatgtttctacttttccgtccttatctgaaaccagatcgtcctgaactatttttccatcactatcgacgattttgaaaactgcgccttcaaggttcccgccgtctgcatctttcttcgttaaagcggcttttcctttataattcaccattgatcccaattcaacatcaggtacttgattcttttcgttctttgcgattgagaagtgaatggcttttgtgtttacgataaaccctgatggggctttcgtctccatcagccggtagtatccggcgggcaaaccgttgatctcaactttcccatttttatcgctttcaatattattttttatcagagtataggtaccgtcgcttgattttttctcaagcttaaatacagcaccggccaaaggattattgttttcgtcttttttgataagcgtcaccttatttttttgatttatgactttatagagtgctcctgctgcggaggatttgccgtcaatcgtaacggagaccccgtttacataagcatcgctgatggtgtagccgtccggcgcttttatttctttcagtacataggttccgtaacggatattcccaaacgtaagtttaccggcatcgtctgttgtgcccgtacgcagcagctgcttgccgtctttagaccataattgaaagtctgctcctgaaagagatgttccgtctgatcctgttttagatatcgtcaggcttcccttctcccctgaccctgagccgccgccgcttgaaatagcgacaaacactgagctgttgttctcttgggtctgctcctcaacattcgtccctgatatcgacactttgttgttgacctgaccgctgctgccggaaatattaatgagagaacgatattgtatgacatacgcacggtcgatttgtttatagccgcctgtaaaggtaagggcaaatgattgttcaccggtggcattgtcagttttcatatctaatttatagtccttatctttctcaagctgcacatcacccggaataagatttccgctgctgtctttcataacgccgttctcattatattttgcttgatatactttaaaagaatcttcatctattatttgattctcatccggtgtgtctttgacttttacgtcatccagtgtcgattggctggcattgacattgatgttccaatcgatattgtttccgttctgtttgccgcctttagaaatcaggtttcctccgtttgcgacggaaactgaacccgtcagcgttcggtctgcatggtcattattaaagtactctgctttgtttgtgtattgattctgtttaatgacctggccttttaatgacgttttaaattcaatcaggtatggtacagcgtcatctgttttgagatgtacggttaacgtatttttgttgccgtctgacggctcttctatttcatattttgaaggatccagcgcctctccttcagtgatggagccgtttttgctgatggtatacgttttaacagcaaccgacccatgcaaaaattgctgaccatctgtgatcgtatcttttatataaggatgttttgaaggttcgccattgtaattgatgccgactttccatgtgatttcttttgaaacggcgttgtatgagccgtttttgaatccgttatgggacgtctgattgttcggtgtgaagccgctcgattccttatttgtgcgtttgttgccgtttttatcggtccatgtcgactccgccgtatttttaatcgtttcgtttgaaaagtcagcgttgaattttgtcttatacgtgatcttaaactgactgtttgtttctgcgtagtccccgatcaatgctattgtaaagccttgatttccgggtttttttgttaatgtataatccgttccttctttcagcgttttgttttcagtcgtgtcttgcatgttaaatgaatcgtcaatgagcgccaggcctccgctggtgaattgatcatccagcgtccagtctttcattgtgtaaccgtttttgttaactgtgattgtccaatcaaccgtcttcttctcatagtctgcgtttgaataatgtttgatcagattctgctgaatggcggttcccggagtttcctttgagtcccccgtatctgtcattgctgtattggtgtatttgacaggactgtcaataatgaccccatcgttgacttgagattgataaatgatcttatatgctcctgtgacagtttgcttgaattttatttcaaagccgttcccgttatcagtcagcgtataatcatcaccctcttttaatggggcgccctcttgttcgctgccgttctggctgaatgtaatcggaaggactttcaatgatccgggaactagatgcagatcgtctgatccgaacgtatccttaatgccggctttggattgatcaatctttttctcaccgtagttgtacataacagcccagctgaacgtttgggtttctcctttataacctgtcgaagatttttctatcatttttccgtaacccgctgttacggaagcttccgcagaaatcggctccgcattgtctccgctgaatgccgccttgtttgtcagcgtgatgtttccgcctttacccggctttgcctcatctttaatttccgtgtcatatatgagccggtaggctgaatcaattgtcccggcgaaggtgacattaccgttttcgccaacggtataacctgaagttatctcatttccctgactcaccgagccgtcaatattcacatcaagttcatacactttcacagagcggaaagtcaattcgtccggaaggctttcagtcaatttcgcatttttaacttcttcttcctttttattaaggtcaaccgtccacgttacctttccgggattaatgcctttatccaatgaccctgatttctcaatggttttattgacattcggtttaaaataaaccgttacgtccggcgtatcagagttaaccggaaacttaatcttttgtgtggttgatccttttatttctttctgattgaattgggtgtttacatacaatgaccccttgacgttagaatcttcttttacctcgccgttaaacgtcatgatgacatggccgctcgtattaatggaaaaagttccgtacgtactatcgccgtcggtcaatggctggttcgtaatgtcattatgcataataaattctttaggcaggtcaaattcatatcgatcaccgtcgtttattgttttccccagctcattcggaatcgcccattggatggtgatattcgccggagagttcgtattcgcagggttgtttttgtcatatggttttcctttttcatccgtcaatttcacatcagttaaaatattttgcgtaatccggtttccgcctgattgaaggcttttagcggcagatttgcttgtaatcaccatttttgattgactgcgtttagcagaaggttttgatttcgttgcctgttctgctttatccccgccgtctgcagatgctgattttttctctgtcttatcctgaggttcagcaggtgttgaagaggtgtttttttctgtatcggaatccgttgttccgtctttcttcacaggtattaacacttgctgggtcttgccggcatccagttgaaaaagagcttttgccattttcgtctcatctgttatgtcgggagtaaacttcgccgacagtgtaatggagcctttggcatccccggcatccgcttcagcatcgttcactttcacttccagcgtgcttctgtttgcttcagctttatatataccgatcacccgatcagctgatttcagctcaccttcggcatcattatctaatgtaaaactttccggaatctttacggtgatattccggtcacttgcatcttctttgtgttttagtgaccattcgtatgtcagtgtcactttatctcccggtgttaaagccggttcaccggcttttgatccgtcaacggtctgctgtctgccgtctttgactgcaactgaatcaaagaacccgctctcgctatgttgtgatccggaagcggctgcgatcggagtaaagctgacaacttggctgaagatgaaaaacagcgtgaagcatgaaatcaatgccgccctcagccttttgctttttttcgggctgaacgaaaagttcctcactcccaatgtcttattcctccccttttatatagacttacgttcgaacaagccggtaagcatgggattctccttatccgaaccaaactacattgtatgaaatcggcctatacaaattctgtacatgggatcatttcagaaatagcgcacaaaaaaagaccggcatcagccggtccggtcattcaatcgtcaattgattttatcttttaattgtttatatcgttcgtattcctttatcgcctcttctacctttcccagtttattaaataactgcagtttgtattgtataattttatcgtcaccgggctctattttctcaacctgcaggcaaacgtccatcgcttgacgatcgttcttctcttggatgagaaaaccaatcagttcgtacgctttgctgagccacagatgggcaagacgcgctttttccggctctgcccacagatagccattctccatgagataatggttctcatatgacatgaccatgttcatgtgccgggttagtgcagctgcgctgagcggaggagcctctttgaatgttttttcccattcaactgtatcaatctttaccccggaaagccggagaatgtatcctatatcagtattttctattgattggctgaagggcagcttaccgattaatttccgtatctgatatattgtcgagtagagctgggtgcttgcttttgatatatcataagcaggccaaaacatctccattagcatgtctttactgaccgtgcgcccttgattaagaagtaaaaatgcatacagttcacgggctttggatgttctccacttgactgttatgtatgttttgacaccatttaccgattgataaaagtccaggttcccaaaacattgtataacataatccgtcccggtattcccgtccgccgacctgagttttttattcattcggatccgctcaacagttgtcagcagccgggcattgtcaaccggttttaatagataatcgacagcattcaattcaaacgctttgatcgcgaattcattataagcggtgataaaaataacttggatattttcattgacctcctgaatcgattcagcaagctcaataccgtttatcccgggcatttcaatgtcaagaaacaccgcatcagctgctgaaagttccgaatgctccagaacttccgccggatcttgaaacgttataatagattgaaaggcgtttgtccgctcaagcatacgattaaaatgaagcaatgccagttcctcatcatccacaattaacgctttcaaaccgcatcccacccgtcaatatagatatatctgaaaataatttcaattataccatgcccaatgccctatatagttggattctttttctttctcttgttgtattataacgtttgtgattacaatatttatacattaaataggataatagaatgcccctgaatgggataaaggagtaatgatgtgaaagaaaaatttatttcgattacgattatttgcggctatgctgctttctttatgatttttatggccatggatcatttttcaggatcatccctccctcaagcggaacagggcgtgatcaatctggaaaattgggattttcaaaaggatggaaatgtccagctgaacgggaaatggattctatatccaaatcagatgctgtcaccgcaggcgcttcattcagcaaaaggaaaaaatcccgtactcgttgatgtccctgtcaatgtgaagctgttcggaaaaacggccgacgtggattacggaacgtacaaactgacaatccgatcaaatgaagacaatcaggttttggggatcagcacatcttatatctacagttcaaaccgcctttatcttaatggaaaagtaatcggacagagcggcaatccttcagaaaaagctgattttaaggcgcagaacaaaccgtacagcagctttttcaggcttcgcaagggtgacaatgaacttgtcctgcatttttcgaatttcggaaaagttcccggctgggggatcgcaaaaccgataacgtttgggactcaagaacaaattatacgcgagaatcaaatttccttttttaatgattccattatgattacggcttttttcattaccggtttatattttctcggcttttttctgcaacggacaaaggataaacatttattgttcttttccgtgatgtgtctgcttttttcagccattattcttatgatcgggaaagaaagaattatctttctcctctttccgtctatttcattttcattgctgaattccttgcgtatcatctcaaccgtgcttgtcagcatggcggtttttctttatctcttttatgcatacagagaaattgtttcaaaaacgacgatcaccattttaaccgctttatccgggatcatcttgatcactgattttatgtccggaagtttcattgatcacctctcatacattttacattctgtgctggccgttacgactctgttttatattacatatatttttacgattgccgccataagaaaaataaaaggaagcacgtaccttacactcgcatccgtctcgatgagcgcttttgtgattcttacgaccatttcagcttacagcggcaaaacagctttttcttttaattcgatctattcattgccgacagtcatcgctttattggcggtggttctcctgatggcgcagcaattcgccggagctttccgggacaatgaagtcctctcacggaaattagtcaaaatggaccaactgaaagatgaatttatcgccaaaacttcacacgaattcaagacgccgctgaacagcattattaatatatgccaaacccttgtagccggcagaaaaaagaagacgatagaggaagagaaagaaaatatgcagctgatcatccgtatgggctacagactttccgatctcgtaaatgatattcttgatttggaaaaaatgaagcaggggatgctgcagattcgtccggttcccgtcgatgtgcatgccgtcatatgcagtgagatgaacttctaccggcttttatccaaacataaaaaactcgcgattcttaatcatgtgccggacgatctccctttggtgcttgcagatgaaaaccgattccggcaaatcttaaccaatcttattgaaaatgcaatcaagtacacatccgaggggaacattattctttccgccgcaaacctgaatgacaaaatgattcaaataaccgtgaccgattccggcagcggcattcctgaggctgatcttgaaaccatttttgattcttttcagcaagcgggagggaaggaagaagatggaacgggtttaggtttaagtattgtgaaacagctcgtcaagctccaaaacggggacatctgggcggagtcagcggcggcgcaaggatcagcctttcattttacgttacccgccgctcaaattgtttctttaccggaagcaaagaccgaacttcctaaatcacagcccggacagagaataccggatatttcgttggtcacgccttatcactcagagaaaatcgatgctccgacgattctgattgtcgacgataatatcgagagtttgaaaattttaattgatatgctggaaggtgttccttataacgtaatcgcagtaaaaagcggaaaagaggcgcttcaagctgtctcttcctcgaagcttgacttggtcatattagacttgatgatgcctgacatgacgggttttgaagtctgcacaaacatccgcgaaaggttcagcatggtcgatctgccggttcttatcgttacggcagccattatcagccatgacaaatacaaggcgtttcatgccggagcaaacgacattttacaaaagccttatcattactctgaattcaccgcgcgtattaaaaatttaattttaatgaagcatacggctcaccaagccacaaatttagaaatggcatttcttcagtcgcagattaagcctcattttctttacaatgtattaaatacgattatcgcgctcagccatttggatattgaaaaagcaagggaaaccactgctgcatttacaaactatttaaggatgagttttgattttcaaaacacttcggacatcagctcattcagaaacgaactttctatcattacgtcatatctttctatagaaaaaacacgcttcggcaaacggcttgatatcctttttgatattgaacaggacattgacttcccccttccgcctttaatgatacagccattggtggaaaacgccgttcatcacgggatcagtaagaaaagaggcggcggacggataaagctgacagcgaaaaaacaaggcgaaaacacgtatcttatcaaagtggaggataatggaaccggcatcatgccggacatacagaaagatattttgtcttctgatgttaatcgcagtgtcggcctgaaaaatatcaatcggcggctgaagcatttttgcggaagcgaattgacgatcaccagcaccccggatgagggcaccgctgtttcgatgatgattcacactcccggcacaacggatgattcgaactcactgaaaacgtcttcattaagatactgattaacttcaaaaggcatgtaaatacttctgccgactgtcgggaaattcccgtcagcctttacagaaagacgtaaaaacaaaaaagcttgaagaaaaaatgatatcttctccaagcttagcttagatgatccgcaccagtctggccgttctcacttaagaaatcgtaacccccgcgcttgcatatcccgccactgtattaataagcgaaaggcctgtcgcagtggcagagaataccattaacagccgggtttgaggagttaccgcaatgttcagccctgtcgtgattccgttgctgatgctgccgattgacaatacgccggtgaggggaggagctaaagtgacggatgctccggggatcggcgtgaacgtattgttcggcacagtagaactgtatagttgtgcggttatcgtaacagtcgagccgacaagcgacaatgctgcggttgtactgaaataggcggcaattgatgtaatggttccgcttctcggagcagaaaaagcaaagttcagcagagttcctccagccccggtaagatcaattgcacctccccctccgacattgacgcccgtcacagaattgccgaacccgacaaggctcaccgttccgattaatccgccggcaatggtcgtcacggcagtgggaagacctgaagcgtaaggaatgatcgcgcctgctccggtgatcccggtggcgcctgttgctccagtagcgcctgttactccggttactccggtgatcccggtggcgcctgttgctccagtagccccggttgctccggttgctcccgttactccggtcgatccggttaccccagttactccagtcgctccggtgatcccagttactccagtcgctccggtgatcccagttgcacctgttattcctgtcgctcctgttactccggtagcgcctgttaccccggtagctcccgttattcctgtcgctcctgttactcccgttactcccgttactcctgttactcctgttactcccgttactccggtcgatccggttaccccagttactccagtcgctccggtgatcccagtggctcctgtagcgccagtatccccggttactccggttgcgcctgttactccggtcactccggttaccccagttactccagtagccccggttgcccccgttactccagtcgctccggttgcccccgttactccagtcgctccggttaccccggtggctcccgttactcctgtcgctcctgttatcccagtggctccagttatcccagtggctccagtagccccggtggctcctgttactccggttaccccagttactccggtagctccggtgatcccagtggctcccgttactccaatcgctccggttacgcctgttaccccggtggctcctgttattcctgtcgctcccgttactccggtcgtgcccgttatcccggtagctccagtatccccggttactccagtggctcccgttactccaatcgctccggttacgcctgttaccccggtggctcctgttattcctgtcgctcccgttactcctgtcgctccggttaccccggtagcgcctgttatcccggtggctcccgttactcccgtggcgccgggatctccagtgactccagtggcaccggttaccccagtcgctccggtattcccggtcgagcccgttgctccggtcagtcctgttgctccagtgaaccccgttgctccagtcagccctgttgctccagtgaaccccgttgctccagtcagccctgttgctccagtgaaccccgttgctccagtcagccctgttgctccggtcagtcctgttgctccggtcagtcctgttgctccggtcagtcctgttgctccggtgcaccccgttgctccggtgaatcctcttacgtgaaaatgatttggatgacagcatggacaccatctttcatgacagcaagggggttcgcaacagaatccttcacagcaatgtgcccgattttgataactgcgcctttgatttcttcttttatgttgaaaatgacagcaacactcattacaatttcggcagtcgtaatcccaagaatcgtatctgttataccaagtatctccttttctcattacaccacctctattttcataatatttccacagagaaaaaaggtgtggcaaaaccccacttctattgggcaatttttcaaatgttcgttaagactgcatcatgcacagcattttacagaaaaaagacctaactgtgcataagtcaggtctttcatctttaaaatatcagtctgctgttgtattaggttgtcggaaaacttatgctgttaaaatcgatattgagtgcagttgctgtcgttaaattattagcagttgtgaaaataaccctgagctggtaagtgttcgttcctgcggtcggcgcagtatccactgttgtatcagcaatcgaaaaactatccgtagctgcgagagtactggttcgcgacagagttcttgtatgaatttgcactgctcccctatataatctcacttcaaaaacaaagtttgaattcgctgcagttgttaacgcggcactgagtgcataatccagctttacattctgcaaagcattaactgggattgccagcgtagcaacgggaacttctgtatttaacggcggataaacagtgagcggcccgttggttcttgtgaagagcaaggttggtgtactgcctgtggcgccggttggtccggttgggcccgttactccagttgggccagtcaccccggttactccggttgatcccgttactcctgttactcccgttgctcctgttactccggttgctcccgttactcccgttactccggttgctcctgttactcccgttactccggttgctcctgttactcccgttgctccagttgctccagttgctcctgtcacacccgttgctccagtcacacccgttggaccggttgggcctgttactccggttgcacccgttactcctgttactccagttactcctgttactccagttgctccagtggctcctgttgctccagtcacacccgttgctccagttacacccgttgctccagttacacccgttgctccagttacacccgttgctccagttacacccgttgctccagttacacccgttgctccagttacacccgttgctccagttacacccgttgctccagttacacccgttgctccagttacacccgttgctccagttacacccgttgctccagttacacccgttgctccagtcacacccgttggaccggttgggcctgttactcccgttgctccagttagtcctgttacacctgttggacccgtttctccggttgaacctgttactcctgttgcgccagtcgctccggttatccccgttgccccagtcactccagtggctcctgttgatcccgttactcctgtggctcctgttggacccgtgattcctgttgggccagtttctccagtggcccctgttactcctgttggacccgtttctccggttgaacctgttactcctgttgcgccagtcgctccggttatccccgttgccccagtcactccagtggctcctgttgatcccgttactcctgtggctccagtcacacccgttgctccagtcacacccgttgaaccggtttctccggttgagccagtaacccctgttgatccagtcacaccggttacaccagttgagcccgttgctccggtttctcctgttggtccagtcacaccggttgggcccgtcgcgcctgttgctccggttatccccgttgctccagtcactcctgttgcaccggtttctcccgttgtcccagttaccccggttggaccggtcgctccagttacccccgttgccccagttgctccggttgggccagttgctccggttgggccagtcgctccggtttctcctgtcgcccctgttactcctgtcgcccctgttactccggttgagcctgttgatccggttacaccagttaccccagtcgatcctgttgctcctgtggctccagtcacacccgttgaaccggtttctcctgttggtccagtcacaccggttgggcccgtcgcgcctgttgctcctgttatccccgttgctccagtcactccagttgcaccggtttctcccgttgtcccagttactccggttgatcccgtggttccggtttctcctgttacacctgttgggcctgttactcccgtcgctcctgtttcaccagttgggccggttgagccagttacaccggttattcctgttgaccctgttacaccggtcgctccggtttctcctattgaaccagttgatccggttgctccagttactcccgttgaaccagttgatccggttggaccggtcgctccagttacccccgttgccccagttgctcctgtcactcccgttgaaccagttgctcctgtcactcccgttgaaccagttgctcctgtcactcccgttgaaccagttgagcctgttgctccggttacaccagttaccccagtcgatcctgttgctccggtttctccagttattcccgttgcgccggtcgccccggatgcacccgttgcgccagttgagccggtttctcccgttgctccagtcacacccgttggaccggttgcgccagtcgatccagttgcaccggtttctcctgttgagccagtcgcgccagttggacccgttactccggttgcgccggttgagccagtcgcgccagttggacccgttactccggttgcgccggttgagccagttgagccagttgagccagttgagccagttgcaccggttgagccagttggtccgatttctccagttacccccgttgcccctgttgcgccggtttctcctgtcgctcctgttactccagttgagcccgtggttccggttgctcctgttgatcctgttaaacctgttggccctgttgcgccggttgggcctgtcgatcctgtggcgcctgtttctccagttaatcccgtcgcaccagttgagccggttactcccgttaccccagtcgctcctgtcgatcccgttacaccagttagacccgttactccggtggggccggttgctcccgttaccccagtcgctcctgtcgatcccgttacaccagttagacccgttactccggtggggccggttgctcccgttaccccagtcgctcctgtcgatcccgttacaccagttagacccgttactccggtggctcctgttgctccagtcactccggttggtcccgttgctcctgttaaaccagttgaacctgttcccccggttgcgcctgtttctccagttattcccgtcgcaccagttgagccggttgagccggctgctcctgtcggtccggttgggcccgttcccccggttacacccgttaccccagtcgctccggttatccccgttgtcccagtcactcctgttggacccgttacacccgttaggcctgttgtacctgttactccagttgacccggttgctcctgttgatcccgttactccggttgcacctgttgctccggttgggccagttgatccggttgctccggtttctccagttattcccgttgcaccggttgagccggtttctcccgttgagccagtcggtccggttattcctgttgacccagttacaccggtcgctccagttactccagttgagcccgtggctccggtttctcctgttgagccagtaacccctgttggtccagtcacaccggttgggctcgtcgcacctgttgctcctgttatccccgttgctccagtcactccagttgcaccggtttctcccgttgtcccagttactccggtttctcctgttacacctgttgggccggttggaccggttggaccggtcgatccggttattccagttgaaccagttactcccgtggctccggttggtcccgtttctcccgttgcaccggttactcctgttgtcccagttaccccagtcgctcctgtcgatcccgttgcaccggttgaacctgttactcctgttgatccggttactcccgtcaccccggttgttcctgttgaaccagtttctccggttgaacccgttgctccgattggaccggtctctccagttacccccgttgcccctgttgggccggttactccagtagctccggtatccccggtcgagccagtttccccggttgctccagttactccagttgcaccggtttctcccgttggacctgttactccggttgagccggttatccccgtcgcaccggtggctcctgttgctccagtcactccggttggtcccgttgctcctgttaaaccagttgaacctgttcccccggttgcgcctgtttctccagttattcccgtcgcaccagttgagccggttgagccggctgctcctgtcggtccggttgggcccgttcccccagttacacccgttgcccctgttgcgccggttgggccgcttggtccggttgggccggtcgatcccgttacccctgttactccggtcgctcctgttactcccgttacaccggttgggccggttgagccagttactcctgttgggccagtttctcccgttgcaccggttgatcctgttactcccgttacacccgtttcaccagttgggcctgttacccccgttgctccggttgggccggttgttcccgttcccccggttataccagttaccccagtcgctcccgttgcaccggtttctccggttgagcctggcgatccagttggaccgatctctcccgtgggtccagttgatcctgctgcaccagtaactccagttgaacctgtcgacccggttggaccggttggaccggttgatcccgttgctcctgttactcccgttgctcctgttgaaccagttgaacctgttcccccggttgcgccggtttctcctgtcggtccggttgggcccgttcccccagttacacccgttgcccctgttactccggtcgctcctgttactcccgttacaccggttgggccggttgagccagttactcctgttgggccagtttctcccgttgcaccggttgatcctgttactcctgttgatccggttactcccgtcgccccggtttctccggttgaaccagttgggcctgttacaccagtcgctccggtttctcctgttgcaccagttactccagtagctccagttactccagtagctccagtatccccggtcgagccagttgggccggtttctcctgtcgaccctgttcccccggttggacctgtcgaccctgttcccccggttggacctgtcgaccctgttcccccggttggacctgtcgaccctgttcccccggttggacctgttattccggttgggccggttgggccggttgatcccgttgctcctgttactccagttgagcctgatgagccagtcgcgcctgtttctcctgttactcccgttgcaccggttgcaccggtttctcccgttgagcccgtcggtccggttgaacccgttgcccctgttattccggttgaacctgtagatccagttggaccggtctctccagttgcgccgatttctccagttacacccattgcccctgttgggccggttgggccggttgagcctgtagatcccgttacccctgttactccggtcgctcccgttacacccgttgcccctgttgggccggttactccagtagctcccgttgcaccggtttctccggttgagcctggcgatcccgttggaccgatctctcccgtgggtccagttgatcctgctgcaccagtaactccagttgaacctgtcgaccctgttggcccggttggaccggttgatcccgttgctcctgttgaaccagttgaacctgttcccccggttgcgccggtttctccagttaatcccgtcgcaccagttgagccggttgatcctgtcggtccggttggtcccgttaccccggtcgatccggttatccccgttgtcccagttactcctgttggacccgttacacccgttaggcctgttgtacctgttactccagttgacccggttgctcctgttgatcccgttactccggttgggccggttgctcctgttgagccagtcgcgcctgttgatccggttgaacctgtcactcccgttgaaccagttgagcctgttgatccggttacaccagttaacccagtcgatcctgttgctccggtttctcccgttgtcccagttactccagttgggcccgtttctcccgttgatcctgttactccagttgatcccgttgcgccagtcgatccggttactcccgtcgctccagtttctcctgttgaaccagttacaccagttgcaccggtttctcctgttgaaccagttacaccagttgagccggtttctccggttgagcctgttgcaccagtcactcctgttgggccagtttctccggttgcgccagtaactcctattggaccggttgagccggttggaccggttgagccagtcgcgcctgtttcccccgttggacctgttactccggttgagccggttatccccgtcgccccggttgctcctgtcgatcccgtgaccccgatcgggccagtcacaccagtttctccggttgaacctgttggtcccgttcccccagttacacccgttgcccctgttgggccggttgggccggttgggcctgtcgatcccgttacccctgttactccggtcgctcctgttactcccgttacaccggttgagccagttactcctgttgaaccagtttctcccgttgcaccggttgatcctgttaccccagtcgagcctgtcgatcccgttgcaccggttaatcctgttactcctgttgatccggttactcccgtcgccccggtttctccggtttcaccagttgggccggttgttcccgttatgccagtcgagcctgttgctcctgttactccagttggaccggttgttcctgttgggcctgttgctccagttactcccgttgaaccagttgctccggttggaccggtttctcctgtcgcccctgttactccggttgggccggtttctcctgtcgatccagttggacctgttataccggtcgcgccggttatccccgttgctccggatgggcctgttgctcctgttatccccgttgctccagttgggccggttgttcccgttcccccagttacacccgttaccccagtcgctccggttgaaccggttgaaccagttgctcccgttactccagtcactccggttgagcccgtggttccggtcgctcctgttacaccagtcgagccggttgctccagttactcctgtcggaccagttactccgtttggaccggttacacccgtcgctcctcttgccccggttgcaccagttactcccgtcgctcctcttgcgccggtcactcctgttgggcccgtcactccagtgggacctgtaattcctgttacgccaggttcacccccggtttgcgccaatgaaacatcgtctattaaaaccgtgccggaagaaactttacttaatacaatgacggcagaggccgcgccagaaggcacactgcttgttttatagatttcagaccatgtgtgaaagagcacgttcggcaaatttccgggtgtaatattttcttgaatggaactgatttgttcacctgctgcgctgacatagatgatctggagagtgacttggggacttggatcatttccgagcgttgcgagtgatacgaatagagtcactgacttggctgaaatgggaacgatttgactgaggtaagcatatggctgagctccaataaattgcgcagaatatctccctgaatgtgcaaacaaactgttaatctgggtatttgccgaactccaccccgctaatgtgccggtttcaaagcttccgtttataatcggattattcattcaatctttttccctctccttcccgttgttgaccgtcttacttattaagacagcatattaatacgggctgtgttttgacaacctaaataaaaaaggtgatttcttttcatcaccttaatccgatccttgaatggggaatcccgtcgcaatgagggagcggtttgctgctgcgacttgtgttacgtagttcgaagaaaggacggataaatagagctgatacgcggctgtttcatccgccttcatttcgtcgatgtacgtaaaaggaattcctatgatttgtccgcctgaagaaaagaggttccgctcttgtctctgtgtttgtatcgttacgccatttctttgcagctcgacagctaagaccaatgagaaatgagacgcaagcggatctaattccacatttacttgtatgacggcatccgttttcaccaattgatctgtcggcgcagctatcactgcgcttaacacgtttatcggtgttccttctaacggaagcgtcattaggtctgctgtattttgaaaagctaccgcaggaaccgctcccggcggcccctcaggccccgggggaccgggcggaccgggcggacccggcggacccgcctccccttgcggaccgcgggagccggcgggtcctcttttgccttcgggacctcgcagcccgggtacgcacaaggcagatcgattttcatttgaagacggaaaccgtttttccgtccctgtttccggactttcaagttcacatggtaattgttcataccggcgtttcatatgtctgctcatatatttgtaaggtttctgtttcaatatcatgtattgattacggccgctgctcataatatcaccccggcaatattctattcgcactgaagtcagcgtgtgcaggcccttcccattccttacagaaataaaaaaaaggcagacctgagtctgccttttttcttctaccataaccctaatactttccaccataatccgccgatcacaagccatgtcacaatatggacgattgacaggataaagccgatggaccaccatttgctttgcgagatataacccgctccgaaaaagaccggagccgctcctgagccgtaatgcgtcgtcgaaccgaaaaggttgctgaaaaacgccaggctgagcgccgccaacagcggcggagcgcctgccgccacgatgacggcgagaaatgccgcatacatggcgctgatatgcgcggttgcgctcgcaaagaagtaatgcgtgtaataatacacgacaatcagaatcataaatgccacaatccatgaaaaaccggaaacagatgatttcatcatattgctgaaccaagacaccatgccgagctcattcaggaaattcgccagcatcacaagcgccgcgaaccaagtcagcgtatcccatgcaccttgttcttttttgatgtcctcccatgttaatacctgtgacaaaagcaaaacggataatccgatcagggccgtcgtcgttgcgtcgatatttaagcttcctccgaaaatccacagcgcaagcaccaataaaaagacgataaccatggagagttcggattttttaaacggacccatttctttcaatttttccgttgcgattttagccgcgtccggtgtttctttaatttccggcggatacagcttataaatgacgagcggcgtaatgattaagctcgccaatcccggtacaatggccgcgattgcccagcttgtccatgtgatgtccacccctgcgacatcgtgggccagcttggcgatcagcggattcgccgccattgccgtcaaaaacatcgcagacgtaatcaagtttccttgaaaaccggtttttaataagaaagcgccgattttccgctctgttccgtctgccggcgttgatccgaaagtttcggataatgatctgataataggaaaaataatgccgcccgcccgtgccgtgttgctcggaatggcaggtgataaaattaaatcactgaacagcagtgaataagaaaggccgagtgttttcttcccgaaccgttgtacgaatacgtaagaaatcctggcgccaagcccggttttgataaatccccgggaaataaaaaaggcgatgacaatcagccagattgtcttgtttccaaatccgcttaacgtattttcaatagatagcgttcccgttaacgcggtgactgccaatgcaaaaattgcaattgcgcccattggcaagggcttggagataaagccgataattgttgcgacaaaaatagcgaacaaatgccatgctttaggttcaagtccggacggcgcgggaataaaccaaatgattaatcccacagcaacagtaataagcaaaggaatgatttttactgcctgctgtttttttgcgtctttttctgaagccattacaggtctcctcctattttgttgtcttccatccccctatcccattttactacttaactaagttaataaacgtttttgttaattaaaaaacacaaaggaatattttcctttgtgcttcttgtttattattttaatatacccgacccggctttagatataacatctgattttacatttgatgatgagccgatggaaccgtgcaatgacggtgtccagccgacggactgacttaatccgttggcagctgacgcgttaattgcggcgccgtttaaaagagtgccgtcttcatgaagtgcttttccgccgctgaagacgctgatgactttatcagcagccagtcccggcacttcaaagacattattctgggcatatatttttgacgcgtggcctgcgccccacgcatagctgaacgggtatgcggcgcttttagagcctgcgtaaaaattattataaatatgaacctgcccgtaccggacccgcggtgcgcgctggacgatgttctggtaatagttatggtgaatggtcaccttcagttttccttcatccgacgtcttgctgtcgctgtttccgatgacggagcctttgtcatggtcatgatatttattataggacaatgtaatataattcgccccgttggctatatccgtctggccgtcatggtgctgatattttctcccgtaatagtagggaaaaccgctgtcgggattcgatccgtcattaaaggtgcaatgatcgatccagatatgcgtcgcgccgttaatggtgatattgtcatattccgagttccagttgccgctgctgccgtccgtcgggtcccattgcggaaaatagtcgtaagcgtcttgaaattcaatgttgcggatgatgacattgtcgacgccgttctttatattaaaacttccgcctgtcactttggcatttgaacccgaaccgatgatcgtcgtatttgaaggaatgtcaatcacgacccgtgctttctggtttttttgagatcgctgtctggcgtcttcctgggtgcctgacggcgcttttttcccccatttgtccgggtcgtacgccttcagataagcgttgagatcatatgccggatctttataatcattaaagccgagcgttttattccggtcgtccgtattcatattgattgtgccttgtatgtaaataatcttcggcgtgctgttggcgcttccccctaatgcagaaacgagctgctgtctgtttgatacggtgtagacattcgataaagaggctttcgcgccgccggttgtcccgccggaagcggctccccagccgtcatttgttcctaacgtctgccgtcccaggtcagcggcatagacgtccgcagggatcatacataaacaaaccgccagcataagtaacatttttttcatgaattgtgctcctcctgattctctgttccaatttattacaattggattgtatcaaatcagttgagaaacggcaccgaaaatgtacagcatgtgcctttcggttttattgcggaaaccgcaaaaaaatcccaagggaccgaaaaccccttgggatctgttcagcttacgcccatgattttactttttcgttatccgtgacaaacagaagaacttttccttcatctaagcgcttttcaaattgtgatgcttcctcttctgaaaagccgatttcgtgaattttgttgcggagctcgtcgccttttttattaaacatattgccgaccgcgtgtttaatgcccgtttctttcgctccgatggtattgacatcagtattatccgccagacggtccgttctgtcgtcatcatgtgaaagcacatatacgtcttcttttgcgacacccaattgctgaagctcttttacgtcctgcatcagtttttgatcatttgtatattctcttactaccggtttcattgataagtcctcccttttgtttttgtatattggatgtttacccgctcaaccaaaggtcaaacaaaagaaagagagttccgggaaaaaacgggcagattgtcggtggatattttccggcgggacatgttacagtagggaaagtaacttttatcagaaaaataaaaatcttcatgagccgattaagcagggaggtggttcctattcattacttttcaccggaacagcgatttaacgcttgggttgtcagtgatttagtgaagcaggtattccgccggcatacccgctgcccggatggaataaaagagcttacggcctttgctgaagatacttttcatattaatatcgatttcgttttctctatcattatcaatatcggtgatatcgaatccgttctgccgacagaaattgaaaataagctgggttcttatctgaccgcgcttcagcccgtgattacctctgacatgcttcattcttcaaaaacgaatgcctatgaatatttggaacatgagaaaaacaccgatgtgtaccggttattcttttaaatacgcatataagaaaagaagggccctggcccttctttttttgttgccggcggacggtttgattttgtattcgggaaatggttcgtgttacatttggaacaaccacttatcttgaaggaggattcagtatgccgaataatcagcagcagattcaattggcaagacgcccgaaaggcgttcccgtccatgacgatttccgctttgaaacgattgccgttcccgaaccgaaagacggcgaagtgcttgtgaaaacgagttatgtgtccgttgatccgtacatgcgcggacggatgcaggatacaaaatcatatgtagagccgttcgctttagatgaagccataacaggcggagtgattgccgaagttctgacagacggcgataagctgaaaaaaggagatgttgtgatcggaaatctcgcatggcaggaatattcagccgtcaatgagtccgccctccgcaagttggatacggatatcgcacccgcccaggcgtatctcggcattttagggatgaccggactgaccgcttacttcggcctgcttgatatcgggcgtccgaaaaaaggcgaaaccgtcgtcgtttcaggggctgcaggcgccgtcggctcaacggtcgggcagattgccaaaatcaaaggcgcgcgggttgtcggcatcgccggttctgacgaaaaaatcgcgtatcttaaagaggagcttcaatttgatgaagccattaattacaaaacggcggatgatattcaaaaagcgcttgaacaggcatgccctgacggcgtcgatgtctattttgacaatgtcggcggaccgatttcagatgcggtgataaacctgctgaatgaattcgcccgcattccggtatgcggagcgatctcttcatataataccgaaagtgaagaggaagacatgggcccccgcgtccagccgaagctgatcaaaacaaaagcgctgatgcaggggttcatcgtcagtgattatgctgaccgcttttccgaaggcgcgaaacaattggccgaatggctcaaggacgggaagcttcattatgaagaaacgattacggaaggattcagccatattcctgacgcgttcctcggtttgtttaaaggagaaaacaaaggcaaacagatcatcaaagtcagtgatctaggttaacatgatgatgaaaaaaggagggctttgtcccctccttttctgctttttcgcatcagccgcgaagaatcaaagtaagaaagccgtcttcatcaggctccgtattttccaaagtgaatcccgctgcttgaaagcagactaaactgatttgattgtctttttagatgcttgccgcccattcccgcacgccggtaaacccaggatcagtcagcagtttttgcaagatctgttttccgtacccttgaagctggtacaaaggattgacgatcaatccgatatacgcccgttcctccacaaactctatagagaccattcctgccggaagctgcccgtcatatgccataatgacagtatcgtcttcatctttactcaatcgtgcataccatgcatttagtggccgcatcgcatccattctccgtctgatattatcgttcttaaaccagtgttcaagtattttcagctcacgtaccttcaatatttgaaatcggtctattgaaaccatcttcccgcccccgcctgaaccttttctattatttcacaataaaaaagaagggcttcccgccctccgtttcttatttctcagataattttccgcctgaataaacggcctctttcagctcaattccgagtgatttggccatttttttcaatttggattcttccatcggcgtgacaaggctgagtacggttccttctttaccggcccgccccgtccggccggatctgtggatatatccgtcttcattcgggatgtctgcgtgaatgacgtacggaagatcatcgatatcaagtccgcgcgccgctatgtcagtcgccagaagcagcggaaattctcccccttcaaacgctgataatatctttgcccgctccatttttttcgcttctccgtgcaggatgccgagatccacgtgatgataggcgagtttttccgcatagacgcttaaatttccgatatctctgacaaacacgagcgcctgcatgccgttcagccgtgacagcttttgcaatagcttcactttatcccgctgatcgcagacgagatattgatgcgtgacgcgcgctttttccgccgtattccgcgccactttcaaaacggccggttcatgtgcgatggcattcagcacctcttctgtctccggctgcagcgtagcggaaaagcttaaaagctgtcggtctttcagcgtcgttttaatgatttttttcatcgtttcgcggtgttcctttgtcacgagctgatccgcttcatcaagaacgatcgtcttgacttcatgcattttcagctttttcgcctgaatcaattcgagcaccctgcccggtgtgcctgcaatgatatgcggtttatttttgagcttctccacctgctttttcacgtttgccccgccgatcaaagacaaagcgcgaagatcggagccttttttccactcctgaatcacttgaaaaatctgcatcacaagctcgcgggacggcgctaaaatgatcacttgcggatgtttctgttccgggttgatccgctccagaaccggaagcgtgtacgccaatgtttttcccgttcccgtcggggattcggcaatgacgtctttcccttccatgatcacctgagcggctttttcctgaataacggtcggctcctgaaagcctgacgcctcccagttttcggcgataaatggttgtgtatgctgtaaaaatggccatgtttgggtcatgtcgttctcctcaattcttaaaatctactccatagtatctcaaatgcacgcggcaaacgcaattttctttttccttccaagccttttaacaaacggtctcctcctttataatcataaatgagaaagacacatgataaaaaaagcgtgtctgataacgatagaggtgtaatgatgagtattttatccgtaaaagatttaagccacggcttcggtgaccgtgcgctttttaacaatgtatcgttccgtcttttaaaaggggaacacgtcggcttaatcggagcaaacggcgaaggtaaatcaacgtttatgaatattattaccggaaagcttgagcctgatgagggtaaggttgaatgggcgaaaaacgtgcgtgtcggctatctcgatcagcataccgtgcttgaaaaaggaaaaacgatccgcgacgtgctgaaggatgcgttccattacttatttgcgatggaagaagaaatgaacgagatttacaacaaaatgggcgaagcggaccctgatgagcttgagcagctgcttgaagatgtcggtgtcattcaggacgccctgacaaacaatgatttctacgtgattgacagcaaagttgaagaaatcgcccgcggcctcggcctgcaggaagtcggcctagaccgcgacgtcactgacttaagcggcggacagcggacgaaagtgctgctcgccaaactgcttttggaaaagccggaaattcttctgttggacgaaccgacgaactaccttgatgaacagcatattgaatggctgaaacgctatttgcaggaatatgaaaatgcgttcatcttaatttctcacgacattccgtttttaaacagcgtaatcaatttgatttatcatgtggaaaaccaagagctgacgcgttatgtcggtgattatcatcagtttatggaagtctacgaagtgaaaaaacagcagctcgaagccgcctacaaaaaacagcagcaggaagtggctgagctgaaagatttcgtcgcccgcaacaaagcccgcgtcagcacgagaaatatggcgatgtcccgtcagaaaaagcttgataagatggatatgatcgaactggcggccgaaaaaccgaaaccggaattccatttcaagcctgcgagaacgtcaggcaagctcatttttgaaacgaaggacttagtcatcggttacgatactccgctgtcacgcccgctcaatctcagaatggagcgcggacagaaagtcgccctgtacggcgcaaacggcatcgggaaaacgacgctgttaaaaagcctgctcggtgaaatccagccgctggaaggcacggtggagcgcggcgagcatcaatacacgggctatttcgagcaggaagtgaaagaaaccaataacaatacgtgcatcgaagaagtgtggagcgaatttccttcctttacccaatacgaaatccgcgccgccctcgccaaatgcggcctgacgaccaaacacattgaaagccgcgtctccgttctcagcggaggagaaaaagcgaaggtcagactgtgcaagctgatcaattcagaaacaaacctgctcgtgcttgacgaaccgacaaaccacctggatgtcgatgcgaaagaagagctgaaacgcgcgctgaaagaatacaaaggctccattctgctgatttcccacgaacccgagttctacatggatatcgcgacggaaacatggaattgtgaatcttggacgacgaaagtgctgtaaacacaaaaaggaactcccgcccgtgcggaagttcctttttttaatgtccggcttttattccggcaagatgtttgcgtcccataagaagaacaagcatgccgacaaaaacgacaatcccgcctactgtatatggtgtgcttgcggtgaagtgttctgacagcattcccgcaatccacggagcgagcgcaccgccgataaagcggactgagctgtaggctgaagacgcgatggaacgttcaaccggcgcagcacccatcacagcggttgtcatgatcgtattcaccataccgaggacagcaccggcaacaacgatacatgtaatgatcaacgtctgatggtcagtccagacccccataataacgagaatggccgcaaaggcgataaagagaacgacgagcgaacgcactgtgcccagcgctttatgcacgagcggcgccgtaaagactgacgtaattgccagcagaaggccccagccgaagaagacgtatccgagaccgtgttcatctaaatccagaacgaacggagaataagcaagcaaaataaaaaatccaaagttgtataagaatgcagatactgccattgtcaaaaggcctttatatttgagcgccttcatcgcatcaaacacaccgacgcgtttcgccggtttcggcagcttcggcagcatgagtgaaatcgcgcaaagcgctataaacatcaggacagacactccgaagaacggagcgcgccatgaaaggctgcctagctctccgccggcaagcggcccgacagaaattcccagtccgagcgcggcctcatacagaataatagctttggcgctgccgccgacagatacaccgacgatgacggcaagcgcggttgaaataaagagagcattcccaagtccccagccgccgcgatagccgacaagctgagcgattgaacttgagcttccgccgagagcggcaaacacgatgataaaaataagtccgagaagcagcgtccattttgcgccgatccggcttgaaatcgcgccggagaaaaacatcataaaaccggtaacgagcaaataacttgtaaataacagagatacttcactaggtgaagcatgtaattgtgcggcgattgccggaagaattggatcgacaagaccgattcccataaaggaaatcacacaggcaaacgcaaccgcccaaacggctttcggctggctgaataagcctgttttctgttgtgatgatgtatccatttgaccagacctcctgttttatccattaaaagaaacgctatatccatagcgtttacagcaaaatcattcgattgattgaatggcgcggtcagctttttctttcattccgttaaggcgcgttttaaaatgctgaaatgtgctgatcttctcatcaatcatctcaagctggtggttcaaagcgtgctgaatctcttccagcttttctttccgttccttcggatccagtgacaacaagtacccctctttgtttaattccagctgacggctcatctccataaactgctgaagttcctgaagggaaaaaccgagcacttcttttgtgctggtgactttttcgagctcctccatatcatcttcagagtaaagccggacgccgccttctgtccgtttaggagcaggaatcaaaccaatctcctcgtaaaaacgaatggttcgttttgtcaatccgcttcgcttggcaacttgatcaatcttcatccattccaaggtgaatccccctcttgtcgtatctgtttctattatacaccatttgaaccttaacgtaaacgtaaactttttatgccggataaacttggcttggacggaacctttgtctttaaagcgccgggagacatctgtgtaagataaaaaaagccggtatgacccgccatcttctcgggggccgtaccggcttttcttaattctcaagttcttcaatcatcagtgacaattcggtccagcgttccatcgccgcttcaagctcttcagccgtttttgcctgttcggccatcagttcttgtatctttccgaaatcacttcccgcttcagcgatttccgcttccagacgctgatgcttttcttcaaggccggcgattttgtcttcgatgccgtcccattcgatctgatccttgtacgaaagctttttgcgctttttcttcggctcttcttccgcctttttctcttcggccggctgttttaccgccgtcttcttctcttttgcttgttccatgtattcactgtatgaaccttggaaacgggaaatgacaccgtgtccttcaaatacgatcaggcggtccacgacgcggtcaaggaaatagcggtcatgggatacggtgatgacgacgcccgggaactgttcgatataatcctcgagcacgcttaatgtttctgtgtccagatcattggtcggttcatctaaaaacagcacattcggctcctgcatcagtacattcagcaagtacagacggcgtttttccccgcctgacagctttctgatatatgtctgctgcatcggacgcgggaacagaaaacgctcaagcatttgttccgcggtgatgacatcgccttccgccgttttgacgatttcggccgtctcttttatatattcaatgactttcatatcgccgttcatttcgctgtgatcctgggtgtagtagccgatccggaccgtctgcccgatggtgatattgccgctgtcaggctgaattctgccggcgaggctgtttaaaagtgtcgttttcccgattccgttcggcccgatgatgccgattcgttccccagggatgacaagctcattaaactggctgatcagcgcttggccgttataggtaatggagacgttatcggcttcgattacttgttttccgagacggtgggaaccgatcgcgaaatcgagtgatccggagactgccggccctttttgctccttgagcgcctccgctctgtccactctcgctttttgtttcgtcgagcgcgctttcgctcctcttctgagccacgccaattcgcggcgcaggaggttttggcgttttgtttctttctgctctgccagcgcctcccgttcggcccgtttttccaggaatacttcatagtttcctttatacgtataaaggctgcctctctcaagctcgtaaattctgttcgtcaccctgttcagaaaatatctgtcgtgcgtgacaagcataacggcgcccggatattgcgataagtagccttccagccattcaatcgtttcattgtccaagtggtttgtcggttcatccaaaatgagcaggtcagccggctggatgacgtttttcgcaatcgcgacgcgctttctctggccgccggacagctcgctgacatccttcatcagatcggtgacgccaagtttggttaaaaccgttttggctaacgtattcgcctcccacgcatcattcgcgtccattcgggcctgcgcatcaagcaggtgtttctgacgctggtcattttccggttcttcattcagcgcctgaagcgctttttcgtactctctcatcgttctcatgacggctgatccgccggaataaatatgttcaagaacggtttgtccggccggaagctcagggtcctgatgcaagaactcaatatgcacgtttcctgaagccgtaatctcgccttcctccgttgattcaaggccggcaatggttttcagaagcgtagacttccccgttccgttcgggccgattaaaccgattctttcattctcttcaatatgaaaggagatatggtcgaataatgtcttatctccgtatgttttataaaggttttccgcttttatgatgctcatggttcctatcaatcctcacgtaagttcatgtgttcattttaaatcaggcgctgtaataaaactagtaaaaggacagacaaatttcttggaagagatcattttgtccgaagaatgtttccgcctctccttttatacactggaggggaagaggtgatgacatgatcagcgtcagtttgtgcgttatcgtgaaaaatgaagaggaagtgcttgcgggctgtcttgattccgtcaaagacattgcggatgaaattgtgattgctgatacgggctcgaccgaccggacgaaagaaatcgcggcccgttatacggataagatttatgattttgaatggatcgatcactttgccgccgcccgtaattttgtgttttcgaaagcggaaatggattatattctgtggctggacgccgacgatatgctgacggtaaaggaccgtgaaaagctgattgaactgaaggcgtcgctttcaaaagaggtggacgcggtatccatgtattatcacgtcggctttgatgatcggggagaggtcagcttcagataccgccgcaaccgactcgtcaagcgtgaaaaagggttccgctggatcggagccgtgcatgagtatcttgaggtatacggaaacatcatagaaaccgatattgccgtcacacaccggaaatccgaaaaaaagcactcgcctccctcggaccgcaacttgaagatttatgagagaatggcggaaaacagtgaatcgatgacaccgcgcgatttgttttacttcgcgaatgaattaaaggatcacggccagtatcagcgcgccatcacgtattatcaccattttctttccacaaaacagtgctggatcgaagacgagatcagaacgtgccaatatctatccgattgctacagggcggtcggccatgaagaggccgccatgacgtctctcttaaaatcatttctgatcgattgtccgcggccggagttctgctgcaggctcggcgactattttgcggagaaacggcaataccggcagggcgtgttttggtatgagctcgccctatccgccaaaagcagtgatgcaggctttacccagctcgaatattccacctggtacccccatctgcagctctgcgtctgccactggcagctcggcgacagagaaaaagcgaagattcataacgacaaagccgcctcctatcatccgtcacatccgagtgtcctgtataatcaaaacgtgctcggcacataacatcaaaaaaaagagctgccccgtatgaagggcagctcctttttgattacgctgtcggaattcctccgcttacactgtaaatttgggatgtcacatagcttgattcttctgaggccaaaaagacataaattcctgccagctccgccggctgtccggcacgctttaatggaacggccggtgtttccttgccgaatttcggaatgttttctccgggctgtcctcccgaaatctgcagcggtgtccagatcggccccggcgctaccgagttgactctgattcctttattcgccagctgctttcctaggccgacggtaaaaccgataatggcatgtttcgtcgcagcataatccaacagcatcgggcttggattataaccttctacggacgttgtcgtgataatagacgcgccttccggcagatacggaagcgcggctttgacgagccaatacagcgagaatacgttgacttcaaatgtttgatagatttgttctgtagtaagatcgctgatatcatccactgcctgctgtttgccggcgacaagagcgagcgtgtcaagaccgccaagctcttgatacgctttttccgccaattctccgcaaaacgcttcatcgcttaaatctcccggcagcagaacagcttttcttccctctttttcaattaacgctttcacttcttcggcatccggctgttcctcaggcagatagttaatggccacatccgccccttcccgggcataagcaatcgcggcggcccggccgatacctgaatcgccgccggtgacgagggcttttcttcccttcagcttgccggctcctttatagcttgtttcaccgcagtccggcacaggcttcatctctttctgcaaaccgggcggttcttgatattgttttggaaattcatcatgatcatatttcgtcagcgggttgtgcagatttgcatcagacatacaagactctcctttatcattggtgatgtattcgtatgtgtacccctgagcatgacggatcaaacgtgtaagtgcagtttccgattgataagggaaaacaaaaaaggagcccgtaagctcccttttttatgattctccgagcacgttttcagccattttcgctaaatgctgggcgcttcccgaaatctcctgcatcgtggcagaaatttgttctaccgccgccgcttgaccgtccgtgttctggttgatggattcaattgagtcctccagccctttcagcaggctgtgaatttttttcgtaatctggtcaatttggccgacattgtcttttgaatgagtggcaagcttgcggatctcatccgccaccacggaaaagcccttgccggattctcctgctctcgcggcttcaatggccgcattcaaaccgagcagattgctttgatccgagatgcccttgacagtaacggaaatgtcggcgatttctcccgcgctttcactgacttgtttcgcctgagcggaaatcccggtcatctgtgctgagaaaccgctgatggattctgagatatccgcgatcgccgaagcggtctgttccacgacggcggacaggctttcagcgacatcatgaagcttggctgatttttcaaggctcgtgccgagaccgacgccgccgatgacttttccgttttcatcgtgaagcggaatcgctctggcgatcagcggaaatccgaacagctctttcggcaccatgcttgtcttcttctgattcatgcggatcgcgtctgtaatgatgtcccctttttgcagcggatctcccggctttacattaagagaaaacgttttagccggaatattcacgattaatttttctgtatcataaattccgatggtgatgtcatcttggatcaggctgtttaaaaaaggcgcaactttgacaaaagcgtcaagcaggctgtgcgtttgctgctccgtctgtatactcatttctttcactccttcttaatatgggaattggcgtttttcatgctgaaccgaaatccatttcagcgtggtgaattcttcaaggctccattcgccgttcagcctgccgagacctgattgtttctcgccgccgaacgcaacgttcggttcatcattaatggtcgtatcgttgacgtgaatcatgccggtttcgatccgcttagcaaactcaacgccccgctccacgtttgccgtatgcacggctccgcttaaaccgaacggtgtcgcgtttgcgatgcttaccgcttcatcctccgtttcaaacggcatgatgcagacggccggtccgaacagctcctccttcgcgatgctcatctcaggtttcacatcttttaaaatgacaggctcagcgaccgttccgctgaatcggccggacagcaccggaaccgctccctcttctatcgctttttcgacagaccgtctcaggccttccgcctgtctctcattgattaaaggaccgataaccgtatcagggtccatcggatcgccgactttcagcgatgacactttcgcttcgtagagctctgtaaatttgtcataaacagatgtgtgaacgagcacgcggttcgccgacatacagatctggccttgatgcgtaaaccggctgaatacggccgcattgacggcgtattcaagatcagcatcctcaagcacgatcagcgcgctgtttccgccaagctccaacagcggttttttaaagtgtttgaccgcaagctgtccgatatagctgcccactccggttgagcctgtaaatgagattatccgcggcacgggatgctcaacaaagctgtcgccgatctccccgatatccgtcacgatgacattcagcagcccgtccggtacgccggccgcttcaaaaattttcgcgataagcgttccgccgcagatcggcgtttcttcatgaggcttcagcacgacgccgttccccgcgccgagtgccggcgcaacagatttcatcgaaaggaaaaacgggaaattaaacgggctgatcacccctgcgactccggcaggtattctgtacagcctgttttcttttccgtcaatcgtggacgggagaattttcccttccatccgcaccggaaatgttgcggcttcttttatcatatttttgacaagtccgatttcaaactcagccttcagccgtgttccgccaagctcctccatgattaagtaaataatcgcttcttcgtgctcttcaatgaaagaaacggctttttccaaaatggcccgctttttaaaagggtttactttgtcccattcttgtttcgcaagagccgcggcgcgatatgccgcatccacgtcatcaggcgtcgcttttcggaatgaggtgatgactttttgagtataaggatttctgttttccaatacgttccggctgctcccatccctccatcggccgccgataaactgcttatttagttcttcatattgaaacatgtaaacatctccctttcaccgaaacttgaaattagttgatgagtcatcttttgtatcggtcttaaggtgagaaaattgaactatttcacaataaaattccctttccttccgtgcatcgacgctttttagctttgtccttttaaagtggaaaattctttaattgactgcgagaaatttcgacaatataatacaaacgtcagtgtatataatgataagaatattatgaattttcaggaggacccatatgtctttactatttcggaaaaagccgctggccgacttaaaggcccagagcaaacagaccagcctgtcccgctcgttaagcgcttttgacttggttttgctcggaatcggctgtgttgtcggcacggggatttttgtgattaccgggactgtggccgcgacaggcgcaggaccggctttgattctgtcgtttgtgctcgcgggccttgcctgcgcgctcgccgcgttttgttatgcggaattttcttcatccattccgatttcaggcagcgtatatacgtattcatatgttactctcggggagtgtctcgcgtttttaatcggatgggacttaatgcttgaatatgttatcgcgctcgccgccgtcgcaaccggctggtcatcctatttccagtcgcttcttgcaggattcgggctgcatcttccggaggcgctgaccgccgcacccggcagcaaaacgggtgccgtgttcaacctgccggccgttatcattattttggtcattaccgcgattgtttcaaggggcgtgaaagaaagcacccgctttaacaatgtcattgtattgatgaaaattgcgatcattctgctgtttatcgtcgtcggtttcggctacgtgaaaccggaaaactggtcgccgtttatgccgttcggaatgaaaggcgtcatcacgagcgccgcgaccgttttcttcgcgtatctcggatttgatgccgtgtcaaacgcgtcggaagaagtgaaaaacccgcagaaatcaatgcctgtcggaatcatcggcgcgcttgccatctgcaccgttctttacattacggtatcgctcgtcctgacaggaatgctttcgtacaccaagctgaatgtcggagatccggtatctttcgcgctccaatttgtcggccagaacaaaatagcaggcattatttccgtcggcgcgattatcgggattacaacggtcatgctcgctctgctttacgctcaggtgcgcctaacatttgcgatgagcagagacggccttttgccccgcatgttttccaaggttcacccgcgttttaaaacaccgtttcaaaacacatgggtgacggggatcgctgccgccgggatcgcaggttttattgatctgggaaccttggcgcatctcgtcaatatgggaaccttggcggcctttacagtcattgcgatcgccgtcatcgttttaagaaagaaacatccggagatcaaatcttccttccgtgttcctttcgtgccttttgtgccgatcatcagcgcatgcttatgcctgtatctcgcaagcagcctgccgggcgtgacatggctcgcctttgtcatctggatcgccgccgggatcgtggtatatatgatgtattcgagaaaacacagtttgttaaataaataaaaagggaggctcttttttctgtttgagaaagaagagccttttttgcccttgataattcattcaccttatgaataatatggtgtatgcttcgtttacataaaaaggaggagaatcactttggcaattgccgccccgcttaaagaaaaacctgtccatcgtcccgagacaaccatgtattctattttgttcattatcgggatctgtcatctgctgaacgattcactgcaagcggtgattccggcgatgtttccgattttggaacgttccatgaatcttacatttacgcagctcggaattatcgcctttacgctgaatatggtgtcttccgtgatgcagcccgtcatcggctggtatacggataaacgcccgatgccgtatgctttgccgctcggactcaccgcaagcatgctcggcattttaggtctcgcgttcgccccgtcttttctgacgattttatgctgtgtcttttttatcggccttggctccgccgtctttcatcctgaaggatcgcgtgtcgcttacatggccgccggcgaaaagcgcggattggcgcaatcgatttaccaagtcggagggaataccggccaggcgatggcgcccttgattaccgcgctgattctcgttccgctcggtcaattcggctctgtctggtttacgctagtcgccgcaatcgctgtgctgtttctcatttatatcgccaaatggtataaaggccgccttattcatttgcgcgccgcaagtaaaaaatcaccggccgccgctgtgcagaccgtgattacaaaaccgattattcttgcacttatcatgattatcttcttaattttcgcgcgctcctggtatgtgagcgcgatcggcaacttctatacgttctatgcgatgaatgcctatcatgtcagcattcagcaggcacagagctacatcttcgtctttttatttttcggagctgtcggaacgtttctcggcgggccgcttgcagaccgtttcggaaagcggaacgtcatcatcgtttccatgacggcatcggctcccttgacgattttccttccgtttgcgggacctgtcatcgcctatggcgtactggcgctgatcggcgttgttctgatgtccagcttctccgtgacggttgtctacgcgcaggagcttgttcccggcaaaatcggaacgatgtcagggcttacggtcgggctcgccttcggaatgggcgcgatcggagcggttgcgctcggagctcttattgattcagcgggattgacgccgaccatgacagccgtcgcctttctgcccgttttaggtctgctcgcctttgtcctgccgagcgacaaaacattaaaagaatggcattcataaaaaaatccctgccgaaaaggcagggattttatgtttcaaccgtataaaaatgagtgtcaggaaccgcatatttcggaataaacccgtctctgaaatcaggaaacgctttttgaatttcatcaatccatttttttacgtttttgatgtacgggacgtaaatcatactgactgtcgcctcatcatcaatgtgatagtaccagcagagattgaattcgttctccgtgacgagcgtaaagcctgaaaaatgataaaaaatcagcggggtgtcattgacatatacagccccgtcgcgcaggctgacgtcatattgctcaatattccacagcgccgcattcgcgccgatcgactccgtgacatgcacgtgttcaaactgcgcgggccacttttcaacatacctttggtcaccgtatgtctttttttcttcattcatctccaccgtacaataggagatgcaatcctgtctccactgccagaccgcccgatacgcttccccggtattccgcgcgccgacaaacccggtgttgtactgccccgtcagcttgtaataagacgcaaaccgttctgaattgcggtgatccgtcagaaaaagggaagcatccggcttttccgcaaacagctcgcccgcatctgagaagaaaaagagatcggtgtccaaatgggcaaaatattcggcttcatcatactccgtcatcacatggaacagaaaagccggcttcagcgtccagcaatattcatgaaacgtccggccgccctttgcttcaagcagctccgggtcctccatttcatggagctgaaccgctgtgacatgttcccacggcacctgctgaagcagttcgtacgctttctgatcgacacacagcacatacagatgaaaatcccggcaatgctcatggagagaatgaatcatcggcatcagtttaaagatatgcgttctggaaacaatggttgaaaaatgatatttactcaccatatcacatccaatttatttaagatccacatgcagtaaatcagcagtcagcgctttgaacgcccttgcaaagtgcgtgacgcccagctttttttccgcttttgccaaaagctttccgacctccggcagctggaagctgttcgccgtgatccgcgggcttttcgtcttccagtccggatcgaggttgcggtctttaaccgcgtgcagcagttcgagaaaaatgtgcagcaggctttcatatttctcataatcaagcagcacttcgatgtctgccattatgctgttggttaactccgcgtcaaacgggccgttaaacgcgaggtgcacgtcaagcgaatgaatgtcattgtacttgtcgcacatgtacgcgatattcgccctgatgtcatcaacggaagcgcagttgctcggatgctcctgatggacgctcatgatatcgcgccgcagctgaaatctcattcccgactgatgaagcctgatgccgagatcataatcttcaaagccgtatctgacaatgccttcatcaaacaggccgagatctgccacgtgctgcctcttaactgatgaattgttcgtaatgaaaaaacgccatggcagacggtagccgttcaaatcatctccgtatttttccaaaatgcttttcagcacccggataaagtcggtatctaaatcaaagcatcgttcaagaaagcttccgtctctgatgtcactttcatcaaggagcggctctttatcgcccggcagctcttcatacagttcggcgagtttttccttatgctctttttcaaaacggtcataataaaagctgtaaatccgcttccagaacataccgcatacgacaagatcgtcccggttctcatgagccttgatatgcttcgccaccaaatccttttcggcaagcatgtcgctgtcatggaaaatcaaaatatcgcctctggcattgcggaccgcctgattccggccgtaagcgatccctctgttttctttaattctcacaaaaatcagcggaaaattcgcgctgaatgattcaagcatggataaggttccgtcttccgaaccgttgtcagccacaatcacttcgaacggctctgtgcattcctgttcattcagggacagcaggctgttataaagcctctccttggaattatatgcgggaacaatgacgcttgccttcacttttcgttcacttcctgtatatgatcatttatttgttatcatcctcagatgcaaagccgctgaactcggggcagacggcgctgaccgtcccgatcacccgcttcagaatgtcctgataaagctgatggacaaacggcaggtcggtccggtccgtctcatgaatctgccgaatgtcgccggctgtgacgatccggtatccgctgaaatgatagaaaatcagcggatttccgtcttcgagcacaagacgcccgtccttccatgaaaacgtgtggcggccgtaattccaatggccgatattcacgccgggcgtggtgatgtcacacacgttcgggaacagaccggacatgtaatccaagtagccttgatctccgaattttccttcgcccggcgcatttttgcattcttcaaggcagcgttctttccaccatctgagacaatctgtgccggcactgtcggttttgaagctgagaaaaccggaattataccggcctaaaagacgctgcagcatgtcgatttcctgtttttcaaatgagggaatgacgatatcgccccgtgacagaagcaccgaacaatccggctgattgtcaaaaatcgcgcgcggatcagcgaagaaaaacaaatcggcatcaatgtacgtgacacgctctaattccggatgtccgtccagcacgaattcgagaaataccggcttcaccgtccagcagtattcgctctgatccctcgtccgcttcagttcaaggagctcctcattttccagtgcggacacctgaatcaaggtgacattatccggacgcattgcctgaagcacgtcataggtgtcttgatccatacacaaagtaaaaatgggggcgtccgcctgaaccgctttcaatgagccgaacaaagcgatagcctgatacagccttccttttgataaaactgtgcaatatgcgcttgtcacgtctttctctcacctctgtttctgttacttttgaaaaaaggctttataccattcgatcgttttttctaatccttcatcaatggtatgcgcgggcgtccaattcagaagcttcctcgccttttccgctgataaatattggtgcttgatttcgtggcttccctggttaagcactttcggcttgaggtcactgtccatcgccttaagaattttttctacaagttccagcaccgtcagctgaatctcattgctgaagttgaacgcttctcccgcaagattgagctcctccatcttttccgccagcaaaaggtatgcctcgaccgcatcctcgatgtaaaaataatcacggataaatgtgccgtcgctgcggatttccggcgcttcaccgttcagcacgagctgaatcgtctgcggaataatccggttgaagttcaaatctccgccgccgtacaagttgccgcagcgcgtaatacagaccggaagtccgtacgtattaaaatatgtgtggcttaataaatcggcacagctttttgatacgtcatacggatgtttgccctgaagaggcatgttttcatcgtacggcagtgtcggctggtcgccgtacgctttatcactggacgcgacgatcacccgcttgatgagcggatgcctgcggcacgcttcaaggatgttccatgtgccgagaatattggcttcaaatgtggaaatcggattgcggtttgcgacgccgacgattgcctgagcggctaaatgaaagaccgtgtcaatttcatactcgcccagcgcccgctcaatcacatccagatcttcaagcgcgccctgcacgatattcatttgcttcacttgttctccctgatacaggttcgacttgggcacagtgtcacggacaagtcccgtcacattagccccctgatcgatcagttccttcaccaagcagcttcctaaaagacctgtacatcccgtcacaaacacatttttatttttccagaaactcaaacttgatcaccataccttccatacatgttgtccccggtcccacatcttgttaatttccagcagatttttatacgtatcgatcgccgtccagaaaccgtaatgccggtataccgccaattcgccgtcctttgccagctccttcagcggttcttcttcaaacatgacgtccctgtctttcggcagataatcaaataccttcgggctgagcacgaaaaatccgccgttgatgatgccgtcacttgagtttttttcagaaaagcttttcgccataccgtcttcaaccgtcagcgttccgaattgcgaggtcttttctataccggtgacggttgccgcagccccttttgattgatgatagctgatcagatgaaacaggttgatgttcgccagtccgtccccgtacgtcataagaaaggtttcatcaccgatgatgtccttcgcctgtaaaagccgccccgctgtctgcgtgtgttcccccgtgtctaaaaaagtgattttccacggctcggatgttcccaatatccgcacttctccggtagagctgtccagcgtcatgctgtgattcttccagtcataatctaagaaatattccttaatcatctctcctttgaaaccaagaagcaggataaattcgttcacgccatagtattgatagagtttcataatatgccatagaatcggtttgccgcctatcatggcgagcggtttgggacgttcattggtgatttcgctcattctcgttccttttccgccgcagagaatgactgctttcatctctacccctcttctctgtgaatattggattcgaaaccgcccgtataagagaaaccaacccgataatttgtccgattctctaccaccggtttcaaaatctactgtaagatatgagagattggcgccctttgtgaccaaaagctctctcttttttcagattggtgaagatacacacaaaaaaagagcctcacggaaattccgtaaggctctttctattatttattatcctgattcagcttttctttgccgtaatgatatttagacggatcaaccggcgtaaagtcgctcaatttgtggaatctgagcaggtctttgtacatcacgctgtcagacagcttcagctgctctgtgactctggctttcaggtttttcgtttcctgattgcctttcagttctttccctgtcttcgtatcgtatacgacattggagatggaagtatatttcggcgtgacgtaatctccgttgcggaacgtcaccgtatcatcatggtctttcgagaagagatcggtgccgaaattaatatatttcttagaatcgatgccttccaagtgaaggatcgtcggcacaacgtccatttcaccgccgtacgtatggttcaccccgccttttttgccggggatgcgaagcataagcggcacacgctgattctgcgcgttttgataaggcgtaatttctttgccgagaatttctttcatcgcgcggttatggttttcagagattccgtaatggtctccgtaaagcataatcaccgagttgtcatataaaccggatgacttcagatctttaaagaactgttcaagcgcttcgtcaagataacgcgccgtctggaaatagtcatccacagtcgcgtcgcccgttttcgctttttcgatcgttgcgtctttttcatcaagcgtaaacggataatggttcgtcagcgtgagcaaatgcgcgtagaacggctgtttcagcgactgaagcttcggtatagattctttgaagaacggtttatccttcagtcccatattgacaaggttgtcatcagacatatcgtatgtgctggcgtcaaagaatttatcgtagccgatatgtttgtaaatctggtcacggttccagaatgatttgtagtcaccgtgtaaaacggcgcttgtatagccctcactttggtcaaggatggcaggaagcgattgatacgtgttttccccttttgtcacgaaggctgacccttcaggcagtccgaacagactgttatccatcatcagctcggcgtcagatgttttaccttggcccgtttggtggaaaaagttatcaaagtacgtcatgtcctctccgccgcgggcgagtttattcaggaacggcgtaacttctttcccgtcaagtttgtaattgatcaaaaatgattggaagctctccaggtgaatcttaatgatgttcttgcctttggccttgccgaaatactcggcgttcggcttcgcataatgcgacgatgtatagttttcaacgctcgtcaggtcatcactgctggcatatgcccgctgtgattccgtctgcgccgtctgtacgccgtcataaatcgtgtaattataaaggcctaagtattttacaatgtaattgcggtcaaacgttcttgtcagcagctccgggcggtcctcttcggcaatcgccaggttcacgaagaacaacacaatacccgtcacgataattaatgacgtataccgttttttcagcttgaattccttcagctcacgtctccacaccagaagcgcgattaaaataataatatcaacaaagtataaaatatcatggccggacataatgctgaagatgccgtctcccatatttccgacattaccggattgctttaagttcgggaatgtcaagaaatcatcgaagaatcgatagaataggatattggcatacaaaataaacgtcatgatgaaatcaataatcaccatgataatcgctgatttgcggcctttcgcaaacaatgccagtcctaaaaagaaaatggcgcttgagaacggattgatcacaagcagaaactgctgcgtcggacccttcaccccaaggttgaattcagcatgataggctaaatacgttttggcccaaaacaaaataatagccagtacaaaaaaactaagtctgtaagaaaataatttcttcatggcaacctctactttcctaaacactttaaatctgtattcttactttttgcttcaattcctgctttccgagcaaaacgaaagcatcacacagccccataaacacaccattttaaaaaacgatatatttatcattcgtgtcatgcctattgaacatcttatcccgccagccattagacgcaggatatccgttcttcgtttcacatttttttctggcattaaaaggtaccttatcagacccggtctgaaaataggagataccaaatataagaataacacaaacttctaaaaacgaaaaatgaatatcaaagacagccgcccaacaggcgggctgaagttattgtatgcaaagggactgaaaaacttgaaggttttttttgggtgatgtaaaaaaaggaccggagtcatccagtccttttcatcacatcgctcaaatccccgcccaaacatcttttgcgtaaatgccttttgtctggaggtccaaaagccattcttgcgcttgccgttcgtctgtttcgcggaccgactgatacgctttttgcagcgttgcctctacatcgggcgccattttgctgccgtctccgcatacgtagaggcgccctccccggccgaggatggaaattaaagcgccggcgtctttcgccattaagtgctgcacatacgttttcggtacgccttctttgcgggagaaagccgtatgaagcgtcacgattccgtctttttcataagcttcaagctcgtcacggtaaataaaatcatgatcgtttctgcatccgaaatacagatgagcctcccccagctcttttccttctttttttaacgctgcccgagcctgcagaaatccgcggaacggggcgactcctgtgccgggaccgaccataataatcggtttttccggatcttccggcagccggaatcgtgtttccggagtgcggacaaacatcacgataccatcctcagggcggcggtccgctaaataattcgaagcgactccgcgatactcacccaaaccgctccgggcggggccgcgaacgacgccgacggtaattgaggcctgcccgggatgtttccgaggcgaacttgaaatcgaataataccgcggcttcagcgggcgcaaaagctccagaaatcgctcaaacggaagttcacacgcttcatatttttcaaggagatcgagcatcgagacgcgcgatgttaagatttgctcctgatagacgccctcctcaagaaaatcttccaattcccgtttgtgcggcggacagaccgtataagcggccatttcccggatttgagcccttgatgccgcttcctgcaattcgacacagctgctcagaagatcatgcagcctgaccggccgatcgagcgggagatgagccgcgctctgtccgctggccgtcagcagcacttgatcattcccgttcagattgaaccggcggagaacacggctgacctgctttttgctgtttaccggcagcacgccgagatgatccccttcatgataggcagcctctttcggcagagtgatttcgatatgccttgtgctccggccgctttccggcgcctgaagttccctgttttccgcaacggatgcgtaaaccgcttcatacgtctgtgccaacggagacccgccaagcccgctgacaaattgaaggcccagcgcacttcgctctttttcggcattttcattcagcttaagaccgaatgccttcatggcgtccgtccacatgctttttttccattcatcaagctttccttcaaaatccccgctgacgtccccttcgcctcgggcagaaaagcgttccgcccctttttcggcaagcttctcatcaatcagtctcggcacagcctgatatgtcgccgcccagttatgatcaccgcagccgaagacggcatatcggacaccttccagctccccgggtttgacttcttcaagccattgaacgaattgtcccgcgttgctcggaggctttccgttataagaggacgtaatgatcaagagagctccttctttcggcagttttccgatccggtcatttaaaggcgccgtttcagtccggacgccgtgcatcccggcagtatcggcaagttcccgcgccacgccttctgcggttcccgtatctgagccgtacaaaatcagaagcggtcggttatcaagcccgataatggatgcgccttttgtttcccgtttttctttttcgacgtcttccgccgctttttcagccgccgggagagctgccgcaacggctcctttgtttctcggccgcacccggatatgaaagtcgccgggcttaatcgtcagtgtctgtttaatatcgagctcataatcggtgtgatcgataaaggtaaaatgctgcagaatcatccccagaacaagagttgcttcatgcagggcgaactgcataccgatacacgccctctgcccgtttccgaaaggcttatacgcatggtgaggcactagatcaggatgttcaaaccgctccggataaaattcctccgcattgtctccccacgcgtctttatcacggtgaagctggggaattaagacggaaattctgtctttcggcgtgatcggatatttcccgccgatcaccgtatcctctttcgcataaaggctgaacgcaggcgcggtcggccataagcgcaatgactcctgcaaaatcattcggatataactaagctccagtacttgtttataagaaggaacgggatcggtcaaaacccgatcggcttcttcataggctttttccaaaacacggggatgtttcagcagaaaatagatggcaaaggaaagcaggccgctggtcgtttcgtggccggcaattaaaaacgtgatgatttgaaaccggatattttcatcatcaagtttttcgcccgtttccgggtcttccacattcagcattctggccagcagatccttttcatcccgtccgcctgaccggcgctctgcgataatactgtctactaacgaaaacatcgcctgaatgtcatgatgaaattggcgcttcgtcctgatcatgagcttatcctgaacatcaaggcgctgcatttggtgcatcgcttcatcaagggcgcgcaccatgctgttgataaacggatgaggcgtttccctgtaatagctgttaaaccgatagttaaagccgcaaagcccgatcgtatcgagcgtcaggcgggtcatatcagcaggcacatcaacggcctcatccgggttcagcctagcccatttttgaatcagctgcaccgcgatatcagtcatcatcgaatgataatctttcatcgcgcgctggctgaaggtcggcatcagaatattatgcgcctttcgccagttaggctcatgcgtccagcttgtaaacagcccgtcaccggcaaacgcccggactttctccaaagcaccttcaatgcttttatcgaaccgctcttcatcacatacctctttcaccagttcatgtccggacacgacgataatggcgcccgccggggtatgcagctgaaaaataggcccctgctcgtttgccagtttgatcagcgacattgtaggcttgtctttatcaagcaaaggaagattgccgagaggaccgaatgtcttcggctgcggaatcggacctgtttccttcatgaataacaccctttcttacacattgatgcgttccttccaactacagtgcccttttcaccggccaattatccgccgttacggatcaatccccggattgacgattgataacggttttttctatactggagaggcttgttaaatacagaaataaggtgagttcacatatggattttgaaatcaagtttttatcgttttatgtcattcaagtggaaggaaaagacgaacaggcaaacaaacagttcaaacatttccagacccttgacacagacgaatttgaagaaagcgagctgaaggattttcttgacggggaattgaagaaaatcgtcaaacggaaagctgaacggcatccgcaatccgagcaggtccccacaaaaatcggccattttatcacggagccgggccatgagcttgattcaaatccgaattacaaccttttcaaccgcgccagacttgcggatacgaaggaagcatttatcgaggcaagcgaacagttcgtccgtacttatcttgacacgagcgccgtgcgcggcggtgtttttatcgtggcttcggccgttccgcgcaaatattttgaggacaaattcgtctttatgatgaaatgcgatttcgagccgaaggtcgcccgcatctcagacgcctcgtctctcattaaaaaggtcgaaatggccatcacgacaaaaaacatgaaaagcattcaatatccgtatatgccggaagaaggcatgacggaagagcatgagctgaaaatccaccaggcctcgcacgcccgttatttcgaagattttctcaaatttgtcgaatatggcgaatcgatgccggaaatcatgaaaaaccaagtcatgaacatggtgcaggagcacgtgtatgaaacttttgaagaaaacagcgaagagcttcagcagtttgagcacgacattgaaatttgggaagcgagtgaaaagcgggaaattcaggagcgcctcgacacccatcaagtcatcgaggcatccgcgcagatcattgaacacacgccggaagccgagctgaaaatgaaagtcggagaaacagagattaaaggattactggctgatttcggcgaatccatccatctcgcaaaagtgaacgggcgctatgtcgcgctcattgaggcggagacgatctcgtttgaaaaaggcagttcgccggtggagtttcacaagcctgaggggctgcatgaggtgattgagcggatacggaataaatctgaacaagactgacaaaagtccagacgccatgttctggactttctgtatttaataaggctctttgagcaatcgatagcattcaccgatgatgtcttggacgccgggcgttccctttatctcgcggcggacgatttcagatgagagattctgcacctgtaatgcccgctccgcccgtctttcgaagtatgcttgacatgcagtttcatggttttcgtgtttttgcagttcttcactaagcacaatcgcgtcttcaatcgccatcgccgctccctgcgccaatgtcggcgctcctgcatggacggcatccccgcccagaacgacgcggcctctgtgccacggttctttgaccgccatctgctcaatcttatgaaacaaaacgggatattcctttgacatattctctgtcacaaacttcactcccggaattccgcgcagcaagtctctcacccgttcaaaacgcgtgtcctcgtcatccctgaagtcagcgtcatacggccggatgataaatacgtatcctgttttttcagagagcggcacgaccccgacctgcgtctgcccctttttatacatcagtgtcgaatcatgaaaaaccggctcgggaaaagaaatgtaaaatctgtgcgctcccatgccgagatactctgttttcacttccctttgcagcatgtgattgcggacagcggagcggatgccgtcaaagccggcgaggatgtcagccgtcatcgcggttccgtctccacaatgcaccgttatttcatctgccgtttcttcgtaagacacgacttttttaccgggcagaatcgtgacccccgccgcctcagcatgcttgctgaggatatcgtttaatgtttgccgcaatatattattccgccccggcaatgaatcatctaaaaacgcctcactcactttaaactgcagcgttccgttttcatcatgctgcttcagccaatccgtttgaaagccgtgttgacagcattcatcatacacaccgatttcccgaagcacccgaagcgcattttgaggctgaagaatgcccgctccgctttttcgcatgtcggacgccgcctcgcaaagggttacttcaaaacccgctctgccgagagaaatcgctgcggacaggccgccgatccctccgcccgctatgatgatctttttcacttcatggttcatcacgataccgccttctcaatttatttatcatttgttaactattagccaccttactatattggctgaaaaactgtcaatctttataggttgccttttgaatccggcaagcttatactttgaatcactaaaatggtacggaggcttacaaaatggaattgagacatttgccggattactcgcagattgccggacgcgctgagatttacgccgatatggatgctgaatcattgaaaacatttttgacgttatttgatatgtctaaaaaaatgaatcaggtcatggagcattatttctcaagtcacggattgtccgaagggaaattcaaaattttaatgtttctgtttgacgaacccggccacagcctgagtccgacggagctggcgaaaaaatccaatgtcaccaaagcgaccatcaccggattgatcgacggactcgcacgggacggctttgtaaaccgcagccggcataccggtgacagacgaaaaatcagcatcgaacttacaagggaaggaaaagaaaagctgatgctgtttcttcccggccacttctccaacatttcaggagtcatggaaagcttcaccgctggagaaaaagcggaattgacaaaaatgcttgaagttttatttgataagcttctgctgttttccggagacagaacataaagtagtattgtaaaaacaaaggcaaatttctatgagatagaaattgaagtaaaaagatgagggttataaaaaaacagcctgcacattagtttgttcaggctgtttcagaagaaataattttaaaattactttctcttcactataaatgcaggtgttttaatgctggaagttacatttgtatatcgatttttagtcttcaacctcactctcacactatttgatcctttttttaacgatttttgatttgagagtttaaatacttttttaggtgttgagtgactgaaagaacctttctttgtttcattagccacccattttgaaccgttccaaacatcaattgtcatggaataatcaaatgttgcgattgtcccgcccccatatgatgctacacaatcaatagaagtagcttttgcagaataagaatccgcatcggtacaaactctcaatacatatgttgcataatctgtactacaaggcataatatccttcccctttcaaattttttgaaacaggtttgttattatgacaaaccctccgttcacttctagctggcaaacgtatgacaaagggaatctcatggcttatgagattaaaaattcaaaactcttaaaattaacaaaaggcgcccctcttagcagggcgcctttttcgcgcgattaatcatcactgtttaaaatcccgaaaaaccgaagcaggttgataaacaagttgataaagtcgatataaagcgtcaatgccatcaaaggaatcaggtcagccgtgatgtcccggtgcttgatctggttcagatcgtataagatgtacattgaaaacacaattgttccgatgacggaatacgccatcatggcggcggaattcagcgggctgaaaatattaaatatccccactgcgagaagcgcgataagagcgacaagcaagaaggaccataaaaacgacaagtcctttttcgttttagcgccgatcgtaccgagcaccgcaaaaatgacaaacgaagaaccgaatgcctccaatacgacataggctccggctgcggacgcataatggctgatgatcggaaacagcgtcattccggaaataaaagcgaatgaaaagacaaacacatatccgacggctttttttcggcgcagccaaaatgcggcgatgatcatgacgacctccaagaccgacagcggcagcatcaatgccggcggaatgaactggcccgtatacaggccgattgtcgcaactaacagtgtaaacacaaataccgtgataatgcgctgcataatagattgtttgctctcataagcagcagtttgcatgtcaaaagtcctcccaaaaaatgatcgtgataggtctattataaataaaatgggagaaatttgcatgattttaagaagattttaaggatgtcaggcctgacgtttcgctgcgcactcctgcatatccatgaaatcatgcagttttttcgtcaatccgccgtgcccgaatcggatatttcccttctgccccggcgttttcacgaaatcaaggaatgccagcacataaagacgcctgacgggaatcggaatgacgcccgcatcataaaaccagccgtcaattgtattgagcacgcctttatttatgccgtattgcttcgtgcaccaatgcagaaagcgcacttcgggcaggtgcagataccggctctcccggaaaggaacagttgaatgcttcatatgtaccgcctcctgtcattggctgttttttaagattgttttacttctttgcttttcagggaaaatcgatatttctccaccttatcaatttgtgtcacttgggaattatgaaccgtaatctgaacagtcccgaaatcgagcgtttccagcgcactgataatcttttcgatcacatgcggatctacgtttcctttggacgtcatcatgctccccctttatgtctggacgttcgtcttttgacaatgagtgttttaatccatactattctgataagaaatatataattatactattatgttttcattcagaaatcaacagcatttacacaattttcggatatgttttctttgcgaaaactttcacttcctttgctttgacataaaccgtgtcgccgacgcccgcccccaaggcgtcatattgctgtttttaagaacgcaatcttcacgttccgacatatttaaattgttttccgctgacaaaaaaagcgccccgcctctggacggagcaccttttttctatgcttttgcttcctcgatcacacatgtgacacccatgctggcgagcgcctgctccagagagccgtaagtttgatactctgaaaaatcaagtcccaattggatagaagtctgtgccacatcaggccgaatgccggaaaacacggttctgatgccgaggagaaataacgttttcgacagcatatacaattgctgcgccaccatcgtatcgacaatgggcacaccggacagatcaattacaaggtttgtgatccgtttggcgacacagttttccggcaccgactccaaaatcacacgcgcccgtctcgtatcaatcgcgccgatgagcggcagagtgccgatcgtatccgcgatcaaaataaccggacagctcaattcggaaataagctcctgctgagatgacagcctcgcgatcattaatttctgaaactgttcagtaaaatccgtcatcagctgatcaaacgagccgttgacaaggtaattccagcggcgggcatcctcatttgttacaatgtcctgatgctcatccataaaacgggtgaccgcctcccaaaagacggttcttgaattgccgatcgcctcaacgacctcatgaacctccgcgtcttgctccactctgcttttcgctacctgagcggcccatttttctttgttatgctgaaaaacggccggatcttccaaaaaagcgcttgcgatgaccgtgtttgtaaaggtatgctgctcgatcagcagccgtttcatttcctcacttaattgatccgcagaataaaaacgccctctcagcttccgtctcagcttgagccatttttccgtcagctctgccgaatgtgtaataatataatcatgaagtaattggtctttgttcactgccgtctcctctttcaagaatatgtacttttgtctaaattataaatcggaatcaccgatcgcactagagaaattaaaaaaacctgcacattaagcttttgattgcttttttcggcaggaggatacactataaaagaaatgaaacaggaggtcagtatgatgatcaaaaaaatcgcgacagtcgccgtatacactgatgatcagcaaaaagcgaaaacattctggacggaaaaagcggggtttgaaaccgtcgccgagcatccgatgggaccgggcgccttctggcttgaggtagcgcccaaaggggccgccactcatttggttatttatccgaaatcgatgatgaaaggcgccgagcatatgaaggcttctatcgtatttgagtgtgaagatgtctttgccgcatatgaacagatgaaaaggaacggcatcacctttttagatgaaccgaaacaaatggaatggggcagcttcgtgcaatttaaagatgaggatggtcatgtctttctcctgaaatcgtaatccgtcaggcatcttaattgactttgagaatcattttcatttaaaatgttggataaaacgtaaaaaggattggagagctgccagatgtttgtgcaaatcagaaacatgaccgtaaaagaaggacatgccgacaaagtaatcgaacgcttcagttcagaaggcgtgattgaaaagcaggaaggtttgatagacgtaacggtcctggaaaaaaaagtccgccgcggtgatgaagaagtcgtcgtgttaatccgctgggagtcagaagaccattggaaacaatgggaaaaaagcgaagaccacatcgcggcccacaaagcaaaccaaggcaagccgaaacctgattatatgcttgggacggatgtcggtatgtatcatgtcagagccgttaaaacaggcgtacacgaaaaataataaagagcatttgccccagggcaatgctctttttattttttctcctcaaacggcaggacaaacagcggtttatcgggcttccattccgcatacagcacgtcctccgtttttttgatgttcagctttttcagctcctgattcagctgcttttcttccagcccggcttctttcagattttcatacagcacttcgccgtcaataatcagcgtgaccggcaaagagacttgcttcggctttatttgcatgtcgccgtttttcgtcgtgtcatattgaaatttcggcaggacgctgaccatcccgtttgtttctaaaattgcgtactccgcttcctgtatagaaaagcaattcgcctgtctgagaaggctttgcaattgattaatgtccagcttattctttttcagcacatcatatttcagttttcctttatgtatgataatactcggctcgccctccaacagctttctggagctttttactttctgcgtaatcagttcgatgagataaattaaaaccccccataacagagaagcaaaaatgatttcaataatcctgacgcctttatcatacaccgcatttccgaccagttcgccgaggatgagcgcggaaataaaatcaaacggcgtaatttgtgagaattgagtttttccaagcaattttaaaatcacaaataaaatacccaagccgcatactaactcccaagccactgtaagtaaatgtcccatattcgcaccttcttcttaaaagtcattaccattatggacattcgcctgttttctatacagcggccggcaatacacaaaaaaacgcagacgaggctgcgttttttcacttctgcttactgtttttgattcgatctgacgacccgtaagcatacctcagcggcataaccggcggccgctccggaacccgtaaacatcgcggcaagccccaagcccatgccttcccagccgccgacaccgaaaatgctgtaaacaaccgtaccgaaagcagtcaggcccagcaccgccaaaagccactcaggccacatctttttcggccatttcttacggagcacagccgatacggcaaagttaagacaaaatgcggccagacagatcagataaaaaaaccccatgtcttttgcacctccgtcatgaggagctttttatttgctcacctttttttcaaacaaatgataacccggcgcgagtccttttgattcgtaacccattccgctgtaaaacgactgaagcgccttgtttccggacacgcagtcgagccggattttcgtttttccaggacaagacacccccgtctccgcccaagtcatgatcgtccggccgagccccgcccctgcaaaccgcctgttaatcgccagccggtggagatatacggactcctcatgtccttcatcgccccatagacgtctgtcccacccgcttgcttcgggaagcagcatgacgacgccggccagctcttcattctgcctgaataaaaaaacataccctttggcgatcgcctcccgcatattgtgggtatcttccccttgcagaaggccgctccactggttcgaccctttatcgcgaagccattctgccgcctgcacgagcagatccatgacttcttcttcatcatccttccgggcggaggtgacccggaatgcccccgccttctcctccgtaatcgtaaatggtgtcataaaatcctcctgtaatcagaatattcgacacctttattatagaccaaacgcagaaaggaaaaaaacagccgtcatgtttgagggccgtttaaaaaattttcttcttatcacgttcttcttttaaaatctcaaccgcttccctgaaacgcatagagtgaacgatttcacgctcacgcagaaaacggagtgaatcattcaggtcaggatcatcggaaatatcaataatccattgatacgtcgctctcgccttttcttcagccgcaatatcctcatataaatcagcaatcggatctcccttcgcctgtatgtaagacgctgtgaacggaacgccggccgcattgtgataaaacagcgcgctgtcatggttgacgtaatgatcactgagccctgcatcacgcagctgctccggtgtcgcatcttttgtcagcttataaatcatcgtcgcaatcatttctaaatgcgcaaactcctccgtgccgatatccgtcagcaggccgatcaccttgtcaggaatcgtgtagcgctggtttaagtaccggagcgctgcggccaattcgccgtccgccccgccgtattgttcaatgagaaacttagccagcatcgggttgcacgtactcactttaaccggatactgcagctttttttcatatacccacatttacagatccctccttatacttgccatggccaaggaccgcggccccagtcccattgagcgccggcctgactcacgccgaattgcagaagcggtccgtactcaggctcaaaccgttttctcagctgccttgagtaccgggaatattcatgaaactgctgaagcgcgagacggtcatggggatgcgtatccagataaagcgtcagctccaccaagacaaagtccgccgcctgaatttgctccagcagccgatagtattcatcatcaatctttttcgccatattcgattcccccccgataaggattatcatagaaatcgtaaagatccttccaaagggtcccttttcttaatgcctccatcggagaaaactgctccaagtgataaggctgaaaccgcatataaagatgcggcggcgttctgtagtattttctcccgatcggcgggcagggatcaaaccggctgtggaagggtttataggatttgaccggtgtaaacggctgattttctttcattacgatcctcctttcctaaacacatgaccttaataggtatgaatccgtatcagcatttatgccctgtaagaaaataaaaaagcccgttaaaaacggactccatgcagctcatctggaatttgaagtaaaaaaatcataatgaaaaatctgattgaaagcactgataatgtttcaatgtatattccgtaatttgctgatcatattcaggatattcgtatctcaataaaacagccactgactttgaatatgctctgaagagaccttggcagtcaaacaatgccttccacacgctttcataagtattgccgacataagtattcagcagaatttcccaatctttcgcattcatgtaatgttgaatatacttataattcttccctacacttaatgaaaactgatgctctatcccaatattccacgcaatcatacgcaaaacattaggccttaaaatgtcattcatatggtccagcgcaaacagtatttctttgcgcattaatcctttaatcacataggttgaaaccatccaaaattcattgcagcaatcatcaaactctccgggggtcggtttctttatatgatattgttcatcactcgcaatcatcttactgttgattcggtcatccttgtctaataatatttccgccaaaccatcactctgtgtaaaataatcctctgtttgactcagagggatcaaagttaagtcgattttatgatgatctttaaaaagcatgagataggagaaccagtctccgagttccggagggaaaagttccatatcttcaggtttttgcatcatcattctttcgccaaactgatccagccagctttcatcagatataaaagagtccatatcggtcacaaaataagaaatatcatagtcttgaaatttgtctcgcggtacatttttattggttcttgatccctctaaagtgacaagacggattctctcgtccttcatcgcaatatcaagaatcaatttcatcatttcgtcttcacttctcacatgtaaaacctcccgataaagagatttttacagatcatgcttttcagtttataaacaacttgctcatgatttacagaaatgtcatatgtacttgatgattttgctccaatcgtaccacagctgcaagaacatgagaagagcactcttgctgttccaagagtgcttttcccgaatggtcagatatattggctgtcccgatgatgatggtgatggaacgggtagccgccgtagcctccgccatagccgccaaaaccgtaccccggatatcctccgaagccgccgtagccgccaaaaccgccgtaaccgccgtaaccgccgtaaccgccgtaaccgccaaaaccgtaccccgggtagccgtagcctccgccgaaaccgtatcccggatatcctccgaagccgccgtagccaccgtagccgccaaaaccgtaccccgggtagcctccgtagccgccatagcctccgccgtaaatcggtcttctttcattcatgatttatcgctccttcacataggttacagtccagtttatgacatgcggaaggaaacgtatgggcatccgcccagttttggcgaaataatcaataattgcttacggagaaatacgatacaggccggccgcataagcaaaataaaaaggccggaacttatgccgccccggcctttttgtctttattcgcctaaatctacattgtgataaacctgctgtacgtcttcgaggtcttccagcacatcgatcagcttttcgaattgagctttcgcatcttccggaagctcgacttcattttgcgcaagcatcgtcagctccgcaaccgtgaactcttcaacgccggcatttttgaatgcctcctgcacggcatggaattgatcaggctcagcatacacgataacactgtcatcctcttctaaaatatcgcgcacgtccacatcagcttccatcagcaattccagcgcttcatccgccgtcttgccttcaacgccgataacggcggtcgcatcaaacatgtaagcgacagacccgctcacacccatatttccgccgtttttcccgaatgcggcgcgcacttcaggcgccgtgcggtttacattattcgttaacgcatcaacgatgatcattgaaccgttcggcccgaaaccttcgtaacgcagctcgtcaaagttctcctccgcgccgcctttcgccttttcaatcgcacgctcaataatatttttcggcacactgtacgtcttcgcgcgctcaagcaccacttttaacgcctggttcgattccggatctggctcgccttgttttgccgccacataaatctcacggccgaacttcgcgtaaatccggctcgtatttgcgtcctttgatgctttcttttctttgatattgttccacttacggcccattttgttccactctctttcacgaattgaatctgtatgataaatactctgcttctattatacctcagcggttgggttgtttcgagtgtaagacattagaaaaaacaggcacgcttaaaatcaccggagcgcagtaagccgaatttgaggattattgtacaaaacataaaaaagcctcccttcatacaggaaggaagtcgcaagtcaaaagattcattttattcttattacctatttcctacactgtatatcctgactcccgtggtaaaattttgatatcgaacaaaagaaaggatatggtcatgaaagttttcgaagcaaccaccctgctggccgctgccaaacagcgcgcgggtgaatacaaaaaactgcgcggtcagatggttaatctgaaaaaagcatttcaaggcgtggctgatctcggtgacggcgatttctctggtcggggcgcagataacatcaaagcctttttccaggaccacgccggcgtcacagacagctggcttgatctgatcgacatgaaaatcgcatttctcacaagccttcccggtaaggtcgaagatgccggactttccaattcgcatgtggaggaatcatttctggagcatgagctcacccacgccctcagtaaatcaaaggcgattatggaagagcagaaaaaggacatgcgctccatcctcggtgagatcgatgacatcatctcgcttgatctgttttcaacggaaagcacagatcagaagctttcttcagctgacaaaaaaagaagcgaaacgatacataagctcggcaagcttgatcacgatctaacgaaagaatacgcagaaaccgaagcgaacgaacagttcatccaagctgacttccagcagcttcaaaatgccacgggcaaaggaaaaagcgccacgccgcttcactacaacgccaaggcgtaccgtgaaagcgacatccataagaaaaaaggcgagattgcaagacattcggatgcttatttgaagatgaagaaagaggaagcgaaggaacgagagattgaaaaactgaaagaaagactgaaaaactacgattatgcgaatgctgatgaattctactcaatggccaaaacaatcggctataaaaacctgacaaaagaacagcagcgctacttcactcaaattgaaaacacgcgtgaacttacagacggtttcaaaggcgttgccgtcggcctttatgattccggaaaagacgcggtcacaggcctgtgggatattgtcacagatccgggcggaacggttgaagccattacaggagcggcggctcacccgatcaagacgtatgaagccatttcagcggcaatcgaagaatcgtaccaaaaagacatggtgaatggcgacacctactcaagagcaagatgggtgtcatatgcagtgggcaccgttgtgacatcagttgtcggcacaaaaggcgtcggcgccgtctcaaaaacaggaacagccgccaaagtgacaaccaaagtcaaaacagcagcacgcaaatccgccgcagcacaaaaagcgataacggtctcaaaacaaaccgttgatcacatcaaacaaaaagtaaacacaggcatagaagtatcaaaaaaacgtgtcaaaaccaagttacatcaaatcggagatctcaccctggctgatattctcccgtatcatccgcgtcacgacgtagtgccggcgggcgttccttacaacgcagtcaacggggtcacacttaaagaaggacttcagaaattcgccaaggtcatcctgccgaaaccgtacggaacctccgcaagcggcagacggacaccggcaccgcatgtaccgccggtaacggtcaaatacggcgagcattttgcgaaatggaccagaaagaaagtattgaagccgaatgtcatctataaaacaaaagaaggctacacgtacaccactgacaactatggtagaattacaagtgtcaaagcagacttgcagctgggagaagcaaaacgcaaccaatatgcgcaatcaaaagcaggtaaaccagaccgtctgacagatgacgacggaggccacctaatcgccacccaattcaaaggctcaggccaattcgacaacatcgtgccgatgaattctcagattaataggagcggcgggaaatggtacaaaatggagcaagattgggcatcggctttgcaagcagaccctccccaaaaagtatcagttgaaattaatgcattgtataaaggtgattcattaagacctactgcttttagggtgaaatataaaattggtgatcaagaagctaaacttatgagaatcaaaaatcaggccggaggttaatatggagacaaaaaaaatggggcaattatatcaaaagatagcagaaagcattaatgagatcattccatctgaatgggaaagagttattctttatgcagaaatacttgacgattcatctgaagttttcttttatttcaatactccacatagtgaagattttatatattctcataatatccctgaacactatcatgtcagtgaggagatttatgaggagctgttatttgacttgcatgacttattcgaggaattacgagatgaatttaaagaaaacaatcaagatatatggactaatctaacacttaatctggggataagcggagaattttcgatagactataattatgaagacgttattcaatctccatataccatctctcaaagacaaacaatctggacttataaaaatgtaggaatttatcctaagagtaaacctttaaaatcctttttagaacagtatttaaattctcaaaattaaaattccccctcctttattggggggtttttttgatacaaatgatccttacaaattaccaattataatgctggaggctgatccttgttggaaaatgaattaaatgcattatatagaaacatagctgaaatcgttaacgaaatgataccagaaccatgggagaaatttttgttctatgctcagattcagagacaggcggaggcacttactttttttacaattctcaaaatgaacctaattattttaagtacagtcttgaaattccgtttgaatttgatattgacgaaaatgaattcgatcagtatgagatggaattatttaaactaagcgaaaaaatgagagatgttttcaaagatcatgatcaagaattattttattctttcactcttagcctagaaagatccggaaaattaactgtcaactttgattatacagattggtttaagacagattatagtttcagtgatcagcttatcatctggaaattcaaatacttaagggaagaacctaaggatccatcattacaaaaattaataaaaaaatatttagatgaatatcctgaaaatccaatttaataaagttgggataatgatgttagaaaaagcttatctaaaaataactgatgtcttaggaaaaataattccttctgaatggagcaaagttgttctgtatgcagaaatactagacggttccagagaagtttattttttctttcaaacacccgaaaacgatgaatatatatactctcatgacataccagaacaatttcaggtcagtaaaaaaatttataccggactactactagacctccaagagttgtttatgcagttacacactgaatttaaagaaaataaccctaaagcatggacaaatttgacactgaatcttgaaagcgatggaacgttctcaattgattatgattatgaagatgttattgaatctgatttggacgaatacgaaagacaaatgatttgggagttcaataacttggggattttccctgaagacgaagaggacaaagaatttgttaaggattatctaaatattaaataatgctatcaacaaaggtagaggatcatcaatggtagctgaaaaaatggaacaactatatcaaaagattgctgaacatctaaatgaaatgattccatctcaatgggaaaagatcgttttatatgctgaaatacttgatgactcagcggatatatacttttattttacaacaccaactaatggtgattacttatattctcattatatacctgaacaatttaaagtaagcgaagagatttacgatcaactgctgattgaacttcaagagctatttgaagaactaaaagaagaatttaaactaggcaaccaagatatttggactaatctcactttaaaattagaaaacaccggaaagttttcaattgattataacgatgaggatgttttattgtctgaacttgatgaccttcaaagacgagatgtttggaaatatcaaaatttagggattttgcctaaagatgaggacgatagaaaattcatagaagagtatctaaacatataataagctttcaaacggctaaaaaaaattaaaaaggattctgatattgtggaaactgaaaaaatgggcgaactatatcaaaaaatcgctgagcaaataaatgaaattatcccctctgagtgggagaaggttgctctttatgccgaaattttagatgattcttcagaagtttacttcttctttagtactccacaaaatcaggaatatatatattcacacgatattcctgaacattttaatgttgatgaagatatatatgacgaacttctatatgaattgcaagattactttgaagagttacgggatcaatttaaaacaaacaacgaggacttatggacaaacctcactttgcatctcgaacgaagcggtaaattcttctcaattgactacgattacaccgatgtcatcgcctcagacttaaacggaacacaacggcaagtggtatgggaatatcaaaacttggggattttgcctgaagatgaggacgataaagaatttgtaataaactacgtcggtctataagtcaataatggctcagcacttccttgctgggctattttttataactacatcataccttatgaatgggcaaaaatatatctttatgcagaagtattagatgactctcccatggttctctttcacttcaagacaccaaaaaaacgtcaactgatttattcgcaagatctaccagcctgatacagtgtaaataaagatatcttcaacacttttcaagagaaatccgagaactttttgaggaattaagaattgagcacaaaaagaataatgataaacaaaacaggcagcatccagtaaacggatgctgcctgttacatcgttatgtatcgtctgaagaagtcatttattttgttttttaaatatgaaaatagatatgacggtaaatatgatggctgtaatgacaatgacccacaagctcgcagccgtactgataaaatggccgtttaacttgtagacgatcccgtaatgcttttcatattcctgtatttggtccgcagaagcatgtttaaacactttatcaactgagtctgtcataaacgcttttctgaacagaacggcggtgtggctgatagggaaatacataataatcttctgcacaaacaccggtacgccgccgatcggtacatatactccgcataaaaaaccgatggctgttccgacaatcgtacttaacgtcgaaaatgcattttgtgtgtgaataaacagcgttaaaaataaatttatggaactcgagagtgcaactgaaagaataatgatccccaatacttcaagtatatctgtaccgcttaaaagcttgctgcctgttgaaacgagaaaaatttcacagcctaaaaaggcgatgaaagaaaagatcaagccgatgacaaatgaatgaatgacatagctcaattggatggtcgcccttgataaaggagctgttaaaaagtcatacgttctcttgctttctttatctttcaccataattccgaaagcgcctaaagtcgttgtcacagctgtaatggacagcaatcccgccaccatccattcgttcaccattgctttggaatcatctgtcgaaccgaccagggccttaatggcgtccagctgtgtctgctgtaagaacacggcatataacagaatgacgataaatactgacagcaaagagagaagcaaaagcgttcgatcacggaagtatatttttatatttctgctgattaaactggataaagacttcatttatgcaatgctcccctttactggcaaactgcttccttgttcttcgataatatggataaacacatcatccatatttcctttaatcacttcgaaagattcaatttttccttcaagacctttcaaaatgtcaaacgcttggagagtggactctacacgaagggaataaatagagtttttaaccgtaaaatccagttgtttattttcaaaccatgccgtcggatcaacgccttgcttaaacatcatatgcagactgtcaaacgcatattgatctttgagctgactcggtgtaccctctgcgatcaggcgtccttctttgatgaccacaacgttatcagccacagcggcctcctccatgtaatgggtcgttaaaaagatcgtcatgtttgtttcttcctgcagccttttaatcgcattccaaacaaatactctcgtttgcggatcaagacctgtagtaggctcatctaaaaataatatagtcggtttatggatgatggcacgggcaatatccgctcttcttctttgtcctcctgacaaatcgctgtattttttctccttaatatcatccaattttaaatagtctgttacaaactgatagttctcttgcacttgtgccttgcttaaatgataatattgtccgcggttcatgatattttcataaacggtcaatcgttcatccaaaatgctctcttggaaaacaactccgatctttttgcggatatgattattctctttcccctcaccaagagtataaccatctattaccacttttccggatgtctttttaatcagcgtacagagaatatcgatagtggtcgatttccctgcaccgttcgttcccagaaatgcaaacagctcgccgcgtttgacagaaaaggatacccctttcactgcttcaaatgatccatattttttgcgcagatcggttactgtaataatgtcttgttcttctcccattctgttcacctcgaaaaataagattctataccgttgttcactaactttatatcgtcattcccgccaggattttctcatttttatccaaatttattatctttttataaataattatcttgattatgaagatatacgtacataaaaaggcttcttaaaagaagccttttatcgctttacgttaatattatgctttcattccccaagtcattaacaatcgccactttgttaagaagctttgtaaggatctcctacacaaatagatttttcttttcctgcaacaacggtagaaatcctagtcgcattcgttaaaaagcctttaacagttgtcgcaaaatcttgcctccctgctttttaaaggtacaagatcatagcgtgattttttcccaattccgttttaataaataattaaaaaaggtttcatttgtgcttatatgtggctttttcttcagcaactgatgaagacttaaagaactcattctctttgtaattcatttgcatatgtttcagccttttaaaaaagtaattttctaattgtttgtctatacaataaataaaacagcctttttgtccccgggtcatcaaagttctgtatgtgttgcgaataatttcgtctgcaagcttctcagcttcttctgaattttgctttagcattttcttcaaaccacgtaaggaggtatctgttttcgcccgctttgaatgatcagtcaatactactccgtccctgcacactagatcatttcctataattacacctacataatcaaattccaaaccttggcatgtgtgtatacaacctatttcattaatagaatcttcatcaattgcccacgtgtctgagttatttaaattccaactcattccgaattgatattcaggaatctcgatatcatgaaattctgttttagctttgccttccttcacccaatcccaacagtaaccagcaactattcgagctttattattaactttattcagatcttctatctgtttacgcaattcatttggatttctatatatacgaaaatcgtagttcattccaatataattagaattcgcagtttcccgaatttgaagaacatcatctaaccagcttatataaccatctgaaccattgcaacgaaactgtgaatccagtttcatatttgtaacctgagcatctaattcttttgagaatttaaggattgtatcagtgctaccaatatcttttaatgttactctttgatgttcgtctatgaaaaaaacagaaagtttggaagcatttattatttccttaatttgattttccccaaggttattaaataaaccggatttctcatttaatcgatgcgcctcatcaacaattaaaacgtcaaattcacctgatggagcattgacataactgcccgatcctttaaataaattatcaatgtgccctttccgaaagttttgttttaacttagtagcatatatatttctgggagctgcattttttgttacatattgtgccacaagacttcggtttgttgcttctactaataaatttatagcaagaacagattttcctgtacctggtccgccttctacaattaatacttttttagtgtttgtacgtaatgcctcattcgccaaatgtaaagccgtctcatacacaactttttgattatcaatcatcataaattctcgattaccttgaagcatactgtttaacgaatcttgaagagactttgaaggccttattcttcctttatctattgtatataggatttctttgttgtctccatacttaatatactttttaatgaaatcacgaagcttacctgaatcacctttgataaaaacaggagcttcttttatataatattcatatattgaatcagttaatggatcgtctgtaccctgattcaagtagttatgtaagtatgcacaaggatatagcttgatatcttctttttgcgcattttcattgtaatcctttattaacgaagcgtatgaccaggcttgataggatgggtgggttgtttcgcgaattcctttatttataaacgttttaacgatggcctctttactatcaattttctctactttctcccattgtttaagttccacaatcacaacagatgaacgatcatccttatctgatccagatataagaaaatcaatacgctttgaagtatggggtattttgaactcaatagcaattcctgcgtccttaggaatttctctatcacttaataccctatacatatactgcatagagttatcccaagatctaacctctttctcattgattttgccaatcttatcattatagtttttacagatattcgtcaccaaattgtcgtcaaacacatcactcagaaactcttcttttgtagcttcatagactatcattgtttcaccttttcattaactttttgcgttatctctataaattcgccgctcaaaataactaaattgagctatattgagaataccatttttcttcaaattaatctgttttaatatgacctttgtacttaataattaaaaaggatccttcacatattaatataaaaagcagcgttctccaaaagagaacactgctttatttcaatactagctttgccacacactccacatgattcgtatgcgggaacatatccaccggctgcacttcgagcgtctgatacccgccatcctcaagcacccgcaggtctcttgcaagcgtgcctggattgcaggacacatacaccacccgcttcggtttcatgtcgatgattgtccgcaggagggcttcgtcgcagccttttcttggcgggtcgacgacgagcgtatcggccgtgatgccttcttcataccatttcggaatgacggtttccgcttctccgactgcgaattccgcgtttgtgatgccgttcagctcagcgttgcgtttcgcatcctcgatggcttccggcacgatttcgacgccgtacacttttttcgcctgcttcgccagaaatagagaaatggtaccgatgccgcagtaggcgtcgatgacggtttcttctccttgcagctctgcgtactcaagcgctttgtcgtagagcacttttgtctgttccgggttgacctgatagaacgatctggcggagatggcgaatttgacgtctccgatgaggtcgtagatgtattcttcgccccagatgacgtttgtttcgtccccaaaaatgacgtttgttttatttgggttgatgttttgcacgatcgatttgacgtgcgggaattgcgccgtaatgtctttgatgatcttcgctttgtgcggaaaatcgcttgttcttgtgatgaagacgatcatcatttcgcccgtgacgacgccgtatctgaccatgatgtggcgaagccagcctttgtggcgttcttcgttataggctttgacaccgtatgctgcacagatgtctttgacggcttggacggcttcatcgtttttggattgctgaatcaggcaggcgctcatgtcgatgatgtcatggcttctttgctgatagaatccggcgacgagtccgccttctctttctcctaccggcacctgcgctttgtttctgtagttccacgggtcttccatgccgagcgtcgggtgcacggtgacgtttgagaggtccagcttgccgatccgttctaagacgtctttgacttgtttctgtttaaacaagagctggccttcataggtcatgtgctgaagctggcagccgccgcattgcttgtagatcgggcacggggcatccgttctgtgcgggctttcttccttcagctcgatcaaacggccgaaagcgaagccttttttgacgcgtgtcactttaatttgcgctttttcctcaggcagggcgttcggcacgaagatcgggaagccctgaacctttgcgacgcccgctccttcatgcgtcaaatcctcaaatgtcacgtcatagtattcatttttttctatcgggggtttcattttcatctataatcacctctcgttttaccaaaagccttgtttcagcgtgctggcaaaccttcaaattcaatgtcagccttcaaaggtttccgatcacgctgaaaagatgacaaaatcctaaaacgaatactgttttaggattttgtccgcgtattagtcatccagctgttccgctttctccttcggcatgatgacgtgaatatgccggtacagattcacgaattcgcccggcagcatgccgccgtattcgccgtccaggttcagctgcatcttttctgatacattgactttcacacggttcgcttttgtgtaaataatgtgctgatcgttaatatgatcgcctctgagcgccatgctcgcgactctgataaactccgcgagattggcttttttcaaaataattaaatcaaacatgccgtcattcaggctggaatcaggggccagcttctcgaatccgccgaccgagttggtcagcgtcactaaaaacagcataatttcgccttgaaacagcttgccgtcatattcaatctcgacttctgtcggtcgaagtgaaggcaacatttccattccctttaaataataagcaagctggccgagcatcgttttcagtttgcttggcacatcgtacgtcagctccgtcagacggcctccgccggcgatgttgataaaatactgaccattcacctgtccgatgtcgatcgggcgggccacgccgttaatgacggtatcagcggcattcagtatattctctctcggaatgcccagcgctctggcgaaatcatttgtcgtgccgaccggaatgatgccgagtgtcgggcgtttgtctaacggcgcaagaccgttgacgacttcattaatcgttccgtctccgccggctgcgacaatcaggtcaaactcccgcaaagcggcttctgttgcggcgtgggtggcatcccccgcgcatgtggtggcatgggtggaggtttcataaccggcttgttcaaatttttgcaggacctgggcaagatttttcttgaaaagctcccgtcctgaagtcggattgtatattatgcgtgcacgtttcattatctcatcatcctacttaagagtatccgatccattattaacactaacaacctttaattatactatgacttgagaaaatcgcaacaatatgtacaggaattgccagaagaaaaaaggccccggctccgtttaaggagccaaggcccgctgtcttactcttcttccgttccaggttttttcttacggaatttcgctaatacttcatatacgatcggcacaatcagaagagtcagcagagtcgaactgattaaaccgccgataacggtgacaccgagtcctttagaaatgacctggcttccgccttcaaagcccaatgccaatggaagcagggcgccgattgtcgcgatcgccgtcatcagaatcggacgcaatctcgtagagccggcttccaggagcgcttctctcgtcgataggccttccgcttctttatggatgacgcggtcaattaagacaatcgcgtttgtgacgacgattccgatcagcatcagcataccgatcatggcattcagactgaccgtctctccggatacatacagtccgactaatgcgccgatgactgtaaacggaagcgagaacagaatcgcaaacggcgctaatgctccgccgaacgtgatcacaagaacgaggtatacgatggcgattgcggcaagcatcgctaacccgagtttcgtaaaggaatctgcaatatccgctgatacaccgccggtatcaatcgatacattgtccggcttatccagtttgtcaactttcttttgaacggctgatgacaccttcgtgacgttgtcagaagtgacggttgccgttacgtcagcgtacactttgccgtcgcgtttggaaatggtatcggatgtcgtgccgtttttcactttcgccacatcgccgattttcacttcttggcctgcaggtgatgtgatggttttatcctctaattcttttacactcttatactggtctttttctgttttgatgttgacgtcaagctctttgccgtcttttttcaccgttgtcaaaggagactgtgacgtttgggacatcagggcttgggagatttgcgaagccgtcaggccctgcttgctgagtttctcctggtcagcgacgaacgtgtactcatcatatgtgctggaaaggcctgagttgacgtctttcagatccttctcctttttcatgatgccttcgatgtctttgaccgtgcctttaatatcagactctgaatctccgtacacatagtacgttaattcgttgttgttgcctgacgaactgaaattttgtgatttccattcgccgcggctcgatgtttttttgatttcttttaagacattgtctttttctttgtcaaaatcaggcgtgtcatcctcgtatttcacgtagaacaatgcgccgtttgagcttccgccgagcggactttgcgatcctaaagaatactgaacagtatcgacatgtttgcgtttaagcagcatatcttccgctttttgcgcagctttttcagcttcgcttttcgtttcgcccggttcaggcgtgtatgtgagctgcatcgttttgtccgcttgcgcaggcaggtagctcgcgccgatcagaggtacgaggaacaaactgccgacaagcatcagaaccgcgatgatagatgtaatccatttatggcttaatgaccaattcagcacttttttatagaaattggccaatctgcccggcttatgctctttcgctttaacaggtgcgcctgtgagcgattttttgaataagctgtgcgcaagcatcggcaccagtgtgatcgaaatcaacagtgatgcggcaagcgcgaagacgattgttaaggcaaacggcataaacagttcgccgatctgtccgccgaccatggcaagcggcaggaatacggcaatggttacgatcgttgatgacatgatcggtttaaacatttcttttgtcgcttcacgcaccaattgcttcccgcgtaaaggttcatctttcagcctcatgcggcggtaaatgttttcgatcacgacaatcgagtcgtcgactacccgtccgatggcgaccgtcatcgcaccgagcgtcattatgttcaatgtgacatcaagctgattcagcacaagaagtgcaatcagcagtgacagcgggatggaaacgatagaaatcatcgttgatttaatatctcttaagaataagagaatgatcacgaccgcaaaaatcgcgccgaaaatcgctttgcttaacatcgtatccactgactctgtaatcggctctgccatatcaagagtcgagctgtacttgaaccctttatggtcttttttgtattgattcagttcatctttaatcgcatcggccacttctaccgtgttggcgtcattggcttttacgatattaattccgatgctgtcctttccgttcgtgcgggaaatggattcagcttttttcacatctttaatgtcggcaatgtcagagagcttgactgtcggcacccctgctgacgcgctttgctgtgcctgctgcatagcctgagcgtccgccgcagatgccgcaccggctccgcccgcttgaccttgagcggcagaagaagatgtgaccggaattctcatctctttcagatctttaattgacgtaatatttccgttaacgacaactgatttttctttgttgccgaatgtgtacaatccaagcggcgtattgacgtcagagccttggatcactttcttgacggtatcttcatcaagtccgtactctttcatttttttatctttgaaagagaattccacctgctcttcctgctgtccggaaacttgtacggacgcaacgccctgaatgccttcaagcttaggaacgagagtgttttccacatttttagtcagatcttcaagcgagcttttgccgcttgtcacactgagcgtcaaaatcgggaaagagttgagactgtaacgggaaatgtcaggttttttcgcgtcatcaggaaggctgacactgtccagcgcttcagcgacttcggttttcgccttgtccatatccttgttgtaatcatattcaatcataaccgatgagacgttttcagaggatgtggacgttacgacgctcactccttctaaattctgcaccgcctgctcgatcggttttgtcacgtcatccgcaacttgactcggagcagctccgggataagtcgtatttactgagaggtaaggcatgttgacgtccggtatggattcctgcttcatattcagaccggcatacagccctgctacagtaacgataatcgtcatcagccaaactgcgaatttgttcttcagtacaaagttaataatgtggttcatcatgtcctccgttaatttttattgactgactggtcattctatataatactaaacggtataactcaacatcgtcaactaataaggcagtaaatttttctaaatttttcaggattaaggggaagcacgtcatgaacgaaaaaaaagagaaaatcataaaaacaggcatccatttatttgccaaaaaagggttttcttcaacaaccattcaggaaatcgccggtgaatgcggaatttcaaaaggggccttctatcttcattttaaatcaaaagaagaccttttgctctcagcatgtgagtattacatcggcatgtctatggaagaaataaagaaaatcaaaacagaacatcagcataaatcgcctaaggacgtattccgaaaacaaatcgcttatcaattccaggaatttatggagcacaaggactttatcattctcttgctgagcgaaaaggtcattcctgaaaatcaaaaggtcaaacagtattttcatgaggccaatattcaatttaacatactgtaccgggatgctttgctctccgtttacagagatgccgtcataccgtttatagcggatgcgtccgttatggcgcaaggaatagtgagctcctatattcatttcttgatttttaatgaacatacggcattccggacggaaaacgtggcggcctttctgattgccagaatcgatgacctgattacgggactgataagagacaatcccgatccgctgctgccgcaggatatcttcactcagccggcggcggacagagaaagactgcttgcggatattcaaaagataaaagcacagcaggggctgcctgaggacgtcctcgtatcgcttgaagtcattgaagaggaatacgcaaaggaagagccgcgaaaaccgattattaaaggaatgctgtccaacttggcaggcagcggaaatgagcagattgaaacgctgcgggcttccattgaaacctatttcagcttataaaaaaagagaccggcgcttaccggtctccgtgtcagcagcgcccttagaggcggctgctttttttatcgttttttgatttcttcaagtaagatcttgttgaccatcggcgggttggcctgtccttttgaggctttcataatctgcccgacaaggaagccgatcgcgcggtcttttccgtttttgaagtcttcaattgactgcgggttgctgtcaagcgcatctgttaccagcttcagaagcacgctttcgtcagaaatctgcacgaggcctttttctttaacgattttttctgcgtcgccgcctttttcaattaattctttaaagactttcttcgcgattttggacgagatggttcctttttcaatcagcttaatcatgccggcaaggccttcaggagtcagtgcgacatcctcaagctctttttgttcggcattcaggtaagctgacacttcacccatcagccagtttgatgcctgcttggcttccgcgcctttattgaccgtttcttcgaagaaatcagccatttctttcgtcagcgtcagaaccattgcgtcataggccggcagaccgagctcttcgatataacgcttgcggcgctcgtccggaagctcaggaatggttgctcttacgcgttctttccattcgtcatcaatgtagagctcgacaaggtcaggctcagggaaataacgatagtcgtccgaaccttctttgacacgcatcaaaatggtttttttcgtcgcttcatcgtagcggcgcgtctcctgctgaatgactccgcctgacagaagcacctgctcttggcgtttctcttcatgctcaagtcctttttgcacgaacgcgaaggaattcaggtttttcagctccgtttttgtgccgaatttctcctggccgatcggacggagggaaatgttggcgtcacagcgcagtgaaccttcttccattttacagtcggaaacacctgtgtattggataattgatttcagcttttcgagatatgcgtaagcttcctcaggtgtgcggatatccggctcagatacaatctcgacaagcggcgtgccctggcggttgaagtcaacgagggaatagccgtcgcccgtatgcgtcagttttcccgcatcttcttcaaggtgaagacgggtaatgccgatttttttcgtttttccgccgacttcgatttcaatccagccgttttcgccgatcggcttgtcaaattgagatatttgatatgccttcgggttgtccgggtagaaatagttttttcggtcaaacttcgtatccgttgcgatttcacagttcaaagccattgcggctttcatcgcgaattcgaccgcttctttgttcaaaacgggcagcacgccgggatagccgaggtcgatgacgcttgtttgggtattcgcttccgcgccgaatggcgtcggtgagcttgagaaaattttagattttgtttttaattccacatggacttcaagtccgattaccgtttcaaagttcacttcatttcaccccttacagttcaggtttcgctttatgatgatctgttgcctgctcaaaagcatgagcgacgcggtatacagtgctctcatcgaagtgttttccgatgatttgcagtccgagcggcagtccgtccgcaaatccgcatggcacgctgattcccggcacacccgcgaggttgacagggatcgttaaaatatcgttggcgtacattgtgagcggatcgctggttttttcgccgattttgaatgccggtgtcggcgttgtcggtccgacgatgacatcgtatttctcaaatacgtcttcaaaatcttttttaataagcgtgcgcactttttgcgcttttttgtaatacgcgtcatagtagccggagctgagcgcgaaggtgccgagcatgatgcggcgctttacttcgttgccgaagccttctgagcgtgtctgtttataaaggtcgatcaggttgtccgcattgtctgagcggtagccgtagcggatgccgtcaaagcgcgcaaggtttgcagacgcttcggaagaagaaagcagataatacgttgcaagcgcgtatttgctgtgcggcagagatacttcttcccatgtcgctccgaggtcttcaagcacttttaaagcggctaaaaccgattctttcgcttctttgccgacgccttctccgagatattctttcggcacggcgatttttaagcctttaatatcgccagttaatgaagaaagaaagtccggcacttcgacattggcgctcgtagagtccattttgtccgggcctgaaatcgcctgaagcaggaatgcgttatcttctacgtttcttgtgatcggtccgatctggtcaagtgaagacgcaaaagcgaccaaaccgtaacgtgacacgcgtccgtatgtaggctttaatccgacgacgccgcagaaagaagccggctgacggatggagccgcccgtatcagatccgagtgaaaacggcacttctccggctgcaaccgcagctgcggaaccgccgcttgatccgccgggaaccgtatcgagattccaagggtttttcgtcgctttgtacgcggagttttcagtagaagaacccatcgcgaactcgtccatattcagcttcccgattgtgacggcttcagcggcttgaaggcgttccacaaccgtcgcatcgtaaatcggatcgaagttttcgaggattttgcttgagcatgttgtgcgaagccctttggtcacgatgttgtctttgacgccgatcggcattccgaagagaagaccgtgttcagaccgtccgtcaaccgcttcgtcaagttctttcgcgtaagcgcgggctctttcttcatcaagctgtaaaaacgcctgcaccttatcatccacggatgcgatccgtttgtaagattcatcaacaagatcggaaatcttgatttcttttttatgtatcatttgtttcagttctgtgattttgtgatcaaataatgacatactgtctccctcctttaatccagaatagatggcacacggacatagccgtctttatgatcgggagcatttttcatgacatcctcgaccggaaggcctttacccgcttcatcttctctcattacgtttttcattttcagcacgtgtgttgtcggttccacgttatccgtgtccacttcattaagctcctcggcaaacgagatgatgctgtcaagctgttctgtgaacatttcagcttcttcatccgtaatggcgagtctcgccaaatgagcgacatgctttacttcttctatagaaattcgtgacataagatccacctccgcataattctccgtttcgtcatataatactgatcatatcaaaaacgagccctctaaagcaacaaaacgccgccttctgaggcatgatgaaaccctctctattttatcctaaatcggggagaaagagaaacgaattatatgtcagaaaatttttacttttataatttattggtagcgctttcttctttaagctgttctaggttggcggggattttttccttgagcgggccaggtttcgagagttgattgatcggggatactttgttaggtttagtaaccatagccggcactaaatcatgcgatccccatcgaaagatgactaaaggcaggctggatcgccggcactactaatctacagaggtgatgcaacatttacatgaaagaagagagggtccaaaaacgtgagtattgaattaattatatctcttggcatttactttgccgccatgctgttaatcggctggtacgcattcagaaagacaacgaatattaatgattacatgctgggcggaagaggactcggtccgttcgtaacggcgctgtccgcaggtgcggcggatatgagcgcatggatgctgatgggagttcccggcgcaatgttcgcaacggggttatcgaccttatggctggcgctcggtttgacgatcggcgcgtattcaaattatctgctgcttgctccgaggctgcgcgcttacacggaagttgcggatgatgcgattacgattcccgattttttcgataaacgattccgccactcgtcatcattgctgaaaattgtttccgccgtgattattatgatctttttcacactgtacacatcgtccgggatggtatccggaggcaggttatttgaatcggcattcggcgccgactacaaattcggtttgtttttaacggcgggtgtagttgtgctttatacgctgtttggcggtttcctcgctgtcagtctgactgactttgtacagggagcgatcatgtttgcggcattagtgcttgtgccgatcgttgcttttacccagctcgggagcgtttcaacgacgattgattcgatcaacgccgttaacccgaaactattggatatctttaaaggcgcgagcgtcattagcattatttcttatttggcatggggactcggctattacggccagcctcatatcatcgtacgatttatggcgattaaagaagtgaaagatttaaaacccgcccgcagaatcgggatgagctggatgtttatttcagttgtcggctcattgctgaccgggattatcggggttgcgtattctcatcacttcggggtctccgtaaaagatccggaaacgattttcattattttttctaaaatcttgttccatccgctgattacgggcttcttgctgtccgcgattttagcggcgatcatgagttccatttcctcacagcttctcgtaacggcaagcgccattacggaagatttataccgcgcctttttcagacgggaagcgagcgataaagaattggtcatgaccggacgcctgtcggtattgatcgtggccgttatcgccatcctgctttccatgaatccgaacagcaccattcttgatctggtcggatatgcgtgggctggcttcggttcggctatcggccccgcgctcttgctcagtctgtactggaaacggatgaatgaatggggagcgcttgcggcgatgattaccggggccgcggccgttttaatctggattacgacagggcttgccgcttcaaccggcgtatacgaaatcattccggggttcttcctcagtctgattgccggtattgccgtcagcctgctgaccaaaaaaccggccgatgcttcttatcagctgttcagccggatggaagctcttttgaaaaacaagaaatagacaaaaagccgtcagattttatccctgacggcttttttcttccgcacttgtcctgctataaatactgtgagaaaatcatatcaatttattataagaaaaattgcggaggtgctgtgcaaattgagctggcctatcgaaccagacattttattaaagctgggcattgccacgctgatcggcatgatcatcggtcttgaacgcgaactgaaaaacaaaccgctcggactgaaaacctgtattgtcatcgccgtcagctcctgtatgctgacgatcgtcagcattaatgcagcatatcatttcccgaaatattaccgtatcatgatggatccgctccgccttcccgcccaaatcatttccggcgtcggttttatcggcgcgggcgtgatcctgcgtaaaagcaatgacgtcatatccggcctgacgacatcggctatcatctggggcgcggccgggctgggtctggctacaggcgccggcttttataaagaggcgttcgcaagcctcttgtttatcctgatcagtgtcgaatttcttccgtggctgatcagaaaaatcggtcccaatcgcttgaaggaaaaggatatccgcgtgagaatgtctctttccgataaagacaaaatgaccgagattttaaaggaaatgaaaagcaaacagctccgcattcactccgtccggattgatgacctgggtgaaaaagaatttccgattatggaagtgaaagtcagtgttcataaaaaccgctacaccactgacgtctattatgatattaaagaaattcagggcgtcgtcggagtaaaatgtgatacgttataaaaaacgccgggctggattcagccggcgtttttctatttatacgaatgcagaaaattgatactccgtaatcggtgtttcattttcgatatcgcgcctgaaggctttcagcatcccgagttcctcgtccccgagtgaattgaggtcaaacgcctgatgcaataatccgtagatcagcatatggcgcagccggaggaaatccgggatgtgttcaaaccatgcggaatcaaggtcattttcttccctgtagcctttcataaagtgagtcatgaattcacccgtaaacgcggccttgtcttcatacgggatgaccggataccacaacatgttgtacagcagaatactgatatcattcacaaaccaattgtagccgatatcatcaaaatcaaatgcagtgatttttccgttgtcccaattaaaattgccatgatgcagatcggcgtgcacaaggccgtagttttcaggattcttcggcaaacggcgcagtttttccattagagcatccgcccgctcaaatacgagatgctgatctgcgggcacgtattttctcagcttcagctgctcctcttcatcccattcctgccttttatatgccggatcgctcagacggtagcttttcgtcagccggtgcatgttccccgtgtactttccaagctggtaaaacagagttccgttccagtctgattcctccactttgcgtccgggcgctttttcatagactcttaataaaaacgctccgccttttccgtccggcacttcttcgacatctttgccatttaatgaaggaatcggctttgctactgaaagcccttcctttgccagatgatgaagccattccatttctccgagaatatattccggcgttcttctgatcgtatgcgtaatttttaagatatacggttcgttatctttcacaatttcatatacgtagttctctgcgtccgcaataaattgaaacttggtaaatccgtatatttcaccggcttcagccagcaccttatcttcctcaaaaatcgctttaatatctttatgcatgctgattcacccttttcataacatttgtaggcggtgtgtgtactcagcaaatgtcattcatcaacattcctgcccttcttttttcacagcagattcgtaacatccgcttagaaatgatatgtgttttcctgttaattcctaattatacaaatatcttaacatacctcattcctctctccaacgatattcacactaaaaaacccttgctcatacagaaatgaacaagggcatcttggttaatcgtaaatatggacggtcggttctttgtcacccgcattgcggacgatcagcgcttcctgcccgtcagacgaggtaatgttaatttcgacatcaactgagccttttgaataataatccatcagctcacctgttaagtattgggtgaaggcgatgacttcacttttcccgtaaaattgcatcgggatttcaatcttcatttttctcatttcatcgttttcgtacattgccgttccgacaactccggtgtaattcgggaagtagctgtcgatggcgtttttgaagcgtttaaacacttcggaatcatcagggtatttctttgccgtgtctgtatccgccggatagaagacgtacttttctttgacatcatcccagtttgaaatggtggatgagccggccttgacttctgttttcgcaatgtaattccccggtacgattgatgttttcggcgcttgtttataaagggcgacggtaatcggcacatttttcaggttatccattttccgaaggcggttaacgacttcctgtgcgatttcttcgccgtggctgcggatcgttttgtcgctgagctccacttcctgctgcggatcacctgtgttttcgcggtaatagtatacagagttgagagcgagaccgatcatgacaccgccaagctggatggaatttttatcttttcttactaagtaatcctgctcaagcatggacgctaagtaaatcgggctgttttcgtttttctcttttgctgatcccgagcttggcagcaccgggtttaagccgagattctggaaattggcgtctgcctttttcgcctttttcagatcactgccctcttttttgcggtcaagccagctgagaaccgtgtcctcatctaaatactggccttcctgatacaaatagtcatccgtcgggaacgtgtcttgagcgagccgcatcagcccagtctcgaattcatcgatgtccagcctcgtgttcagccggtccgcggtcaggccgcgcgcttttccggccttaaacgggagcaccattttatagtaggaatcagagatattatatttcggtatgatcgctttttcagaagactttgccgttttctgcgtgatctcttcctctttttttcccccgaaactcggcgaacaggccgacagcatgagtactgccgccgttgccgtcgccgccaatgccaacatctttttcaatagaaaacactcctcttatttctttagctctcccaatagctgtgcttcattccatacttcaatgtttaattcctgcgcttttgtcagcttgcttccggccgcttctccggcaatcagcaagtctgtttttttgctgacagatcccgtcagctttccgccgagcgcttcaatctgcgccttggcttcatttctggacagctcttcaagctttccggttaacacgatggttttgccggcaaaataagagtcgctgtcctctgcttttacttttttcgggcctttgtagagtgtgttcacaccgagttcctcaagttcattcaaaagctcaagcatttcctctttgcggaaataggtgataacggcatcggccatcttttcgccgatttcatctaccgcaagcagctcttcttccgtggcttgtttcagattttccaggctttcaaaatgcatggccagtgttttggccgcttttgagccgataaaacggatgccgagaccgaacagcaggcgttccagcgaattctctttcgacttttggatggagctgatcagattgtcagttgatttttcccccatccgctcaagccggatgacctgttctttcgtcagcttatacaaatcagcgacattacggacgagatgttcacggaaaagctgtgtgatgacacgttctccgagtccgtcaatattcatcgcgttgcgtgagacaaagtgaatcaggccttctctgatctgcgccggacattccggattgatgcagcgcagcgcgacttccccttcaatgcggacaagttcgctttcgcactcagggcagctggtcggcatattgaattctttttcttccccggtccgctgttcaattaagacattgacgacctcagggatgatgtcgcccgcttttttgacgaccactttatcgagaatgcggatatccttctctttaattaaatcttcgttatgaagggatgctcttgagaccgtcgttcccgcgacttttaccggttccagaacggcggtcggcgtaataacgcccgttcttccaacattcagttcgatatcgagcagttttgtcacgacctcttcagccgggaatttgtaagcaatcgcccagcgcgggctttttgccgtatacccgagttcttcctgctggtcgagcgaatcgactttgatgacgattccgtcaatttcataagggagatcggcccgcttcgcctgcagctcttcgatcatttcaatgacttcatctatcgtgtcgcattttttccgttcctggtttgttttaaaaccgagctcatccagaaaatccaggccctgactctgtgtttccacacccatctcgtcaagctccgctatactgtagacgaagatgtcaagatttcgtttcgctgcaattttcggatcgagctgtctgagtgagcccgcagccgcgttccggggattggcgaacggctcctcttcatgtttcagcctttcctcattgagcgcttcaaatgactgtttcggcatgtacgcctctccgcgcacttctatggaaagattacgtttcattttcagcggaatgttgcggatcgtttttaagttttcggtgatatcttcgcccgtcgttccgtctcctcttgtcgcgcctctgacgaaatagccgtcttcataacggagagaaacagcaagaccgtctattttcagctccacattgtaagcgacgccgtcaccgacagcctgacggacgcggcggtcaaaatcgcggagatcatcatcgttaaatgcgttgccgagactgagcatcggcgtgccgtgctgcaccttttgaaaagattcaagcaccgctcccccgacccgctgtgtgggcgaatcaggcgttctgagttccgggtgctcttcctctatggcaatcagctcctgcatcagtctgtcgtactcggaatccggcacgctcggttcatctaaggtgtaatattcataactgtactgatcgatggtgcggcgcaattcttctgcccggtgtttcgctgtttctttgtccatcatgttcttcctttcctcttcaggttactgcttttcaatcggcgcaaaagcggcaagcagacgcttcacgccgactgggctcgggaatgcgatatcaagctcggtgctttcgccttctccttttacgctgacaaccgttccggtgccccattttttatggcccgctttatcgccgaccgcccagctgagcgagtcgccgcctgttttgttcgcataggaaacgggacgggatacgggcccgcgtttcggctgcacttttcttcccggctgcatgcgaggtgttttcttctcatttaggttctccaataaatcgccaggtatttccctgataaagcgggattccggattcatattggtgcggccgaataaggttcgcattttggcattcgttaaatacagttcttcttccgccctcgtaatgcctacatatgcgagcctgcgttcttcttccatctcggcttcttccatcagggagcggctgtgcgggaacacgccttcttccatgcccattaagaacacgactggaaattcaagccccttagcggcgtgcagtgtcattaaagtgacggcatcctttccgcctgcttcttcttccttctggtcgagctggtcaatatccgcgatcagcgccagatcggtcagaaacgcgacgagagacttgtcttcgcttttttgttcgaagtttttcgtcacggaaagaaactcgtcgatattttcaaggcggctttgggcttcgattgatttttcggccttcagcatttctctgtattccgttttttcgagaatttcttccgtgagttccgtaatggacaggtaatcctgcatgttcgtcagattttcaatcatcgcgccaaagccgtcaagcgcgtttgccgctttcgcgctgacaccgatgaaatcaacctgtttgatcgcctggaacattgacattccgttcatcgccgcatatgaagcgattttttctagcgaagtggcgccgacgccacgcttcggcacattgacgatccgcgtaaaactgatgtcgtcgtccgggtttgacacaaggcgcaggtatgcaagaatgtctttaatttctttcctgtcgtagaacttggttccgccgacgatattgtagttcagaccggattttaaaagggtttcctcgatgacgcgcgactgggcgtttgtccggtataaaatcgcgatatcggaaagcttccgccggcccgagctgtgcagctcataaattttgcccgcgacgaattggccttcgccgaattcattgtcgccgctgtaataagaaagcttgatgccttcgtcattttccgtccacaggtttttcggcttgcggtttgagttgtttttgatcacttcgttagccgcctgcagaatccgctttgttgagcggtagttttgctcgagcagaatcacgtttgcgctcgggtaatctttttcaaaggaaaggatattcgcgatatccgccccgcgccatctgtaaatggactggtcggagtcaccgacgacgcagatattttcaagacgggccgcaagctgcttcacaaggaggtattgcgccctgttcgtatcctgatactcgtctacgtgaatgtactggaatttgcgctgataaaactcaagcacttccggcacacgctcaaaaagcttaatcgtcgtcatgattaaatcatcaaaatcgagcgattggtttttcagcagttttttctgataatcggtatacacgtcactcgtgacctgatcgtagtagccgccggccgtttttgcgaattcctcaggttcgatcagctcgtttttggcgctgctgatggagcctaaaatacttctcggatcaaactttttcggatcgatattccgctctttcaaaatccctttaataacggaaagctgatcagccgtatcaagaatggagaagtttcggttgatgccgattctgtcaatatccctgcgcagaatccgcacgcacatgctgtggaaggtggaaatccagatttcatccgcgccgggtccgagaatgctctccacccgctccttcatttctctggcggctttatttgtaaaggtaatcgccagaatgttccatggcgccacgtgtttttccgccattaagtatgcgattctgtgcgtcagcacacgtgtttttccgcttcccgcgcccgccatcagaagcagcggaccgtccgtcgtcttgaccgcttcctgctgaacgggatttaatccgcttaataattgattgctaatgtaattcatatccgttcaccgcctatcaaacatatgttctatcataaatcaatttcgtccgcttggctactttgtctttacagccgccaccgttttgagcgcctgatcaaaatcttcatatacggcatttccgacaacgatgacatcggcatgacggccgaaccgttccgccgtttccgcgtctttaatgccgcctccgtaaaacaggacggacttgtccagcacagccttcgttttctccaccgtttctatgtccgccagcatcccgctgtattccagataaaaaatcgggagatgaagcaaatgttccgcgacccgcgcataggcgagaatatcttctgtttctatatgtgtatccgcctccgtcaaagcggccgccttacaatcagggttgacgatgcagtagccctccgtcacgatttcctccattgacatgagctctccgtattctttcatcgcctgatgatgcatgccgacaatccagtccgcctttttgctgttgagcacactcggaatgaaataaagatcaaacccgggcacaatggaatcaatcgtcgacacctcaagtacgcacggcactaaaaaccgccgcacctttgacatcagtctcagcacattgtcctcggtgatattgtcgcttcctccgatcacaatggcgtcagtccctgattcacaaagccgttccagctgttcatccggtaaatctttattcggatcgagtttaaaaacatgcttccactcgttaacatcgtacatgcgttttcgttcctccattcgtttcttgccatttaaacattataacaaattcgtttggcccggaaaaacggaaaaagacgtcattcacctgattcacaaaaaaagattgcgctccgccggacgggaaacggctatgtttgaaaacagacaaaatgtggaatgtcaaagagaaaaaaggcaaggagtctgatctcaatggaacaagccattatcgtactgatttgtatattgatttttattattttagttcccgccgcattgtttctctggatttacataagagacgaaaagcaggaagaacattcagtgctgcgcaattatcccgcagcgggaaaactgcgctatatatttgaaaaaatcggacctgagctgcggcagtatttattcagcaatgataacgaagaacagccgttttcccggagagaatatgaacagacggtcatgtcgggaaagtataaaagcagaatgatgggcttcggctcagaacgggatttcgatcagccgggctattatatccgtaacgccctcttcccgaaacaaagggaggagctgcgcacagatcagacgccgaagatcgacacgatggtatacaagattgacaaagacaacctgctgaaacgcagcgaacaccgcgaaaaagcaaaagcggacccttattacctgcatccggacgatgtgcaagtgatcggccgcgacacatgcaagaaaccgttttatgtaaaagggttaatcggacaatcagcgatgagctacggctcacttggcgaccgggcaatcaccgccctgtcaaaagggctgcaccaggccggcggcacatggatgaatacaggcgaaggcggcctgtctgagtatcacttgaaaggcggcgcggatattatctgccaaatcggccccgggctgttcggcgtgcgcactgaagatggagaattttcatgggaagaatttaagaaaaaaagccgcctcgagcagattaaagcctttgaattaaagcttgcgcaaggggcgaaagctagaggcggtcatattgacggttcaaaggtgaccgaagaaattgccgccatcagaaatgtgcagcccggacaatccattgacagtccaaaccgcttcaacgagttctcaaatgttccggacatgcttgatttcattgagaaattaagaactgtcggtgaaaaaccggtcggcatcaaaattgtcccgggcagccgcaaagaccttgaagaccttatttcctgtatgagttcatcaggcaaacttcccgactttattacgattgacggcagtgaagggggaacgggagcttctttccatgagctggcggattccgtcggcctgccgattctgaccggcctcccccttgttgacggccttttgaagacatacggtataagagataggctgaaaattttcgcatccggaaagctgctcactcccgataagattgccgttgccctcgcgttaggcgcggattttgtcaatattgcccggggaatgatgttttcagtcggctgtatccgcgctcaagtatgccacaccaatcattgtcctgtcggagtggcgacaaccgatccaaaacttcagcgcgcgctcagtatcgaggataaacagcatcgcgtctgcaactacgtgctctcgttgcgtgaagggctgtttcatcttgccgcggcggcgggtatcagctcgccgattcatttctcagctgaacacatcgtataccgggaggaagacggaagcctgagggaacttcccggccttttgaatcagcacgcataaaaaaaccgcctgccgtcatcggcagagcggttttttacgtagctgaggaggattctcctttgtttacgcggtcaagcgccatttcataggcgtcgttcccgtaatttaagcagcgcttcacccgggaaatcgtcgctgtggaagcacccgtttcgctttcaattttgtgatacgtatttccttcgcggagcattctcgccacttccaaacgctgcgccagcgattggatttcattaatcgtacaaagatcgtcaaagaaacgatagcattcctccagatctttcagcgataaaatagataaaaataactggtccagttcttttccgcgtaatttatcgatttgcatcgtcaaacaccttctcctttactaatggaagctgcatcgagatcaggcacgatattaatccatgtctttcctggcacaaacggaagaatctcaccgccttttacgggcagaatacggccgtctttatattcccagtctgactccataacatcgccgtgctgaagcaggaggcccttcccccctgactgaatatcgatggcccgccttccatctttgtctgtcatgcgatggccggcttcaacaataaaaatgttgtgcatggctaaaggctttccggtctcccggtctgtcgctttcacaccatcagagcttcttgtataagcatcagcttttttatcataatcgtattcgacaagatttgtaacgttttgtgttccataatctatccgaatattgtaggtttcgtttccgggttttgcatctgatgtctgaaatgggagcggttctgtttttccgttcagcttgtatcctttttgttccgccgccttcctgatattgtcatacgacgtgtaggaattgtggggcggcttgctgaaatcggctctccaaaacaggctgccgtcaaaatccaaaccgtttatataatcgtaagttccggactccagctgctttttagcgccgggactccagccatgatggacaaatatgctgttaaacccgctgctgagcgtgacaaaatattccctcgcgctccgcacaggcccgaccgtttccggcatctcactttgaaaaatcgcgagaaaccgcgtaatccggccctccgcgagcgcttcgatgacaacatccgcctttgacagcccggattggggcctcgccttcggatgattgttcactgcgactgcaatcggacggcgttctgcaagcttctgctcagttttcagccccgttaaaggagcttccgcttctttcggctgcacctgatcggcattgttctgccggcaggcggcaagcagcaaaaacgcaaaacaaagcatacaaacggttttccatcttttcatatgtcggctccctgcttttatattttaacgcattatcgatggaaagagtacagtttttttcatcacgtcgaatattcctctcggcgtaatgcggatataaggcaggtgtgtgctctgcaaaaagagcagcgtatagatcggatcgcagaatcggtagccccgctcctccagcagcgtcctcagtttttgctctttctcaagcacttcttcataattctccgcggatgcagaaccgtttaaagcgaggggaatctcatgaagaaccttcccgttttcggcaagcacgattccgccgccgatttctttcatccgtgagaaagcgagcaggatatcttctttattttttccggcagcgataatatctccggttgtcgtgtaggaactgacaaagccctgcacccgatcggcaaaacctttcagcattgtattgacccgccattttccatgcttatcgagaagcgtgagatagcattcatcatgatcaaaagaaagctggtcaacagaattatcaatcgcaatcatatacggctccataatgacggcgttgcgcattatcacacccatcggcattgaaaactgtaaatcatccatcgtcatatcatatgaaagctcaagagggacaagaccgccctttttccaatccgtttctgtaaacgcattcatatttcggccgtcttccctcagcaggatgcctttggagatcaccgtgaccgggtccggattcatcgggtcatcgagaatgttcaatgaagcaagccggcccggaccgatcacaccgagaaagtcatccatctgataatatttcgcgatattaaaggaggccatattgtaggcgtcaatcgccggaaccccttcctccaaagcgattttgattaattcattcgtcatgccgcctttataaaaatgcggcgtcgctccatccgtcgtgtaaaagaaatgatcataatgccggaagcctttttgatggagatcctgcaaaatcgttctcaaatcagggcggatggatgaatgtctgagcgaaacatagtaacccaattcaagccgtctcatcacctcgtcgccattcatcgcctcgtggtcagaatcagccccgaacagtttcatcttcgtcagtgttttttcagaagctccgggaaaatgcccttctatccgcttgcgcagtttctttgtcgcctgcatgcaatgaagcatcaagtcatcgccgtccatgaggcgcggccatccggtcaattctccgccttgaatgacatccggatgctcaatccattgcttgcggacatcaaaagaaaggagctggtcctcattcagcacttcagtctgcagatcatatctggaccaccagaaatattgcaccggctgtttttttagttcttccaatatagtaagcgctttctttttaccgctgtgcaaaagaaaaaacaagttatcattaacaaacgtcgttgttccgaattgagacacatattcggcgagcgtttggggattatatatttgaaaaggatgtgtatgcggttcaatgtaacctggcacaatgtattttccttcacaatttatggtatgaatgtgctctgctgcatcaggaagctcatgaccaacatatacaattcggtctccgtaaatccagacgttctttttcagccattgttttaaaaaaggatttaatacgagagcatcccgtaaaagtagcgttggaagcagctttgagtctacaacatccgcctgtgatctgatgtctttatttttccagttaaaggtacgttcggacattcacatactctccttcgcttatattagacccatcgtatcacatccgcacaattatcgcacggctaaaacgttacaaattattgaagatgaatgaaaaactttttctaagggagctgaaatgatgaaaccgaatatcagtttattaaacgccgttatgcgcatcacttgcggcctcaccattttgtctgccgcttcagcaaaatacacgagaaaaccttggtgcaagatgcatctcttctgtatgatgatgggcgcgatgaaagcggcgtccggcatcctccgcttctgtccggtgacatatatgttccaagccggaatgaatcaggatgacagccatcagcaagaaaaataacaagccgtttcggcttgttatttttttctcctgtcccgcgagtatgagaagaatctgccggcgatcccggcatcacaaaagccgggacagaattcaagactgcatgacaatcttagtcgtcattcagaagaaaacccgcatcttttaagacgcgggggtttcctctttatcgctgcgatgctttcagcgcacgggcgccgatatcgcttctgtaaaacagtccgggttttgtcagccccgaaacggcgctgtacactttatccctcgccgcttcaaatgtctcagcaaatgccgtgacattggcgacccggccgccgttcgtaacaaattgtccgccgtcttttttcgttccggcatgaaaaacggcgatcccgtcttcagcggacgtcaaactgccgatcggcgtccctttcgcatagccttccggatagccttcagaagccaggacaacgctgaccgcggccgtatccttccatcttaggtcaacatctttctcatgcagaagatctaagagcacctgaatgaggtccgattccattctcggcacgacggcctgtgtttccggatctccgaagcgcgcgttgaattcaatgacctttgatccgtcttccgtcagaatcagccccgcgtacagcacgcccgtgaaggagcgcccctctttcaccattgcttttgccgccggcttcacaatcgtttcgactgcgcttctgacgatatcatcggaaatgtgcggcaccggtgagtaggctcccattccgcccgtattcggccctttgtctccatcgaaggcgcgtttatgatcttgagcgatgaccatcggatagacggtctccccttttacaaacgccattaaagaaaattcttcgccggcgagaaactcttcaatgacaacagatgcgctcgcctccccgaatttctcatcctcaagaaaatcgtgcaggcattcaatcgcttcttcttccgtcatcgcgactgtgacaccttttccggcggcaagcccgtccgctttaatgacaatcggcgcgcctttttgctgtacatatgctttcgcctcttcaaatgaagtaaacgtctcgtactccgccgtcggaatgccgtattttttcattaaatccttggcaaactgtttgcttccttcaataatagccgctttttcagacggtccgaaaacaagcagtccggctttttcaaactcgtcggctatcccttcaatcagaggaacttcggggccgataatcgtcaggccgacatgatgttctttcgcaaacgcaatgagtgcggcatgatcgctttctccaatgttgaccagcgtcgcgcagtctgtcataccgtcatttccgggcgcggcgtacaccgtgtcaacaagcgggctttgcgccgctttccaagccaatgtatgctctctgccgccttttccgataatcaatacattcacgcttcgttccccccttaatgtttgaaatgtctgatgccggtgaataccatggcgattccgtattcatccgctttcttaatcgaatcttcatcgcggaccgatccgccgggctggataatcgccgtgacaccggcttttgcggcttcttcgactgtatccggcatcgggaaaaacgcgtctgatccgagcgcgctgccttttgctttttctccggcctgctcaatggcgattttggctgaaccgacgcgattcatctgtcctgcgcccacaccgaccgtcatatggtcttttgcaaggacgatcgcgttggatttcacatgtttgacgactttccaggccagcttcaaatcttcccattcctgctcgctcggctctctttttgtcgggatggtgatgtcggcgtcatcaaatccatggacgtctaaatcttgaatcaaaagaccgccctgtacggaagtcagctgtttttctttctttcctgatgcggtcacgtcaagcgtgagcagacgaaggtttttcttcgccgtcagcacgttcagcgcttcttcactgaaagaaggggcgataatgatttctaaaaagatgccgtgaagggcttcagccgttgcctgatcaacttcacggttcagcgcgatgatgccgccgaaaatggaggttttatcagcttcatacgctttattgaatgcttcctcaattgaagctcccgtaccgactccgcatggattcatatgtttaacggcaacagctgcgggttctgtaaattcccggacgatttgaacagccgcatccgcgtccttaatattgttataagaaagctctttgccgtgaagctgttttgccgctgcgatggaaccggagacaggaagtgcgctttggtagaaaaccgcctcttggtgagggttttcaccgtagcggagcgactgttttttctcaaaagtaacagtgaattgctcagggtctttctcaccggcctcgcgtgttaagtaatcagcgattaatgcgtcgtatgccgcggtatggcggaatactttggccgcaagctcgcgttttcttttgagcgaaacgccgccgtgttctttcatctcattgagcacggagctgtaatcggccggatctgtgatgaccgtcacatcctgatggtttttcgatgcggcgcgcagcatgccgggaccgccgatatcaatgttttctatcgcttcatcgtatgttacgtcttcttttgaaatcgtttctttaaacggataaaggttgacgaccacaaggtcaatcggtgcaatgccgtgttcattgatctgcgccatatgctctttattgtctcttacggcaagcagaccgccgtgaatattaggatggagtgtttttaaccgtccgtccataatttcaggaaatccggtcacttctgaaatgccgatgacatccacaccgttttcctgaagaagtttttttgttcctccggtcgaaatgacttcgacgccgagctctgtcagttcctttacgaaaggtacgagatttgttttatcagaaacactgattagtgcgcgtttgattgtcatgccttttcacctctgttatttagtcccagcagccgtttcacaacgctcggataccatttgtgctcaagctcgtgtattgtatgctctatgtcttcaagcgtatcgttttcctgtatttcgaatgctttttgcgcgataatcggtccggtgtccatgccttcgtcgacgtaatgaacggtaatgcccgccactttcacaccggcccgatacgcctgtccgacagcgtcaatcccagggaatgccggaagaagcgagggatgtatattaataatgcgtcctccgtatgcttcaagcagcgtatctccaatcagtctcatatagccggcgagaacgattaattccgccccgtgcaggcgcagctgttcaataatggcccgttcaaaggccgctttgttttcaaaagatgacggttcaaaggcgaatgacgggatatgtaaagcctccgccctttccgccgcctttgcctgaggcttatccgtcacgagaagcgagagctccgcatcccacttctcttctctcatgcgtttggcaatggcctcgaagttcgatccgtttcctgaagcaaataccgcaaactttttcatgaaagagccgcaccgccgaaagaaatgccttcgccccgcttgacccggccgatcagataagccttctcgccctgagcttcaagcgtgccgatgacgtctgtcaggttttcttctttaacggcaaggacaaaaccgatgcccatattaaagacattgaacatttcttcttctttcagcttgccgtgctcctgcagaaacggaaaaatcggcgggatcggccatgatccgtgatcaatttccgcgctcaatccgtccggcagcatccgcgggatattctcgatgaatcctccgcctgtcacatgcgccatgccgtccaccttaccgcttttcaccgccttgagcaccggcttcacatatattctcgtcggttccagcaattcttcgccgagaggacgcgcaaacggttcatagacagtatccaaatcaagtccgccgtcatcaagaagcacttttctcaccagggaaaatccgttgctgtgaaggccgcttgaagtaagtccgattaagagatgcccctcttcgatatgttcaccggtgacgatttcgtctttttccgcgacgccgactgaaaagcccgcaatatcgtattcatcagacgtatacagccccggcatttccgccgtctcaccgccgataagcgctgatcctgactgctcgcatccgtccgccacaccctgaacgatctgctcaattttcaccggatcagccttgccgaccgccaaataatcaaggaaaaacagcggctccgctccctgggcaagcacatcgtttacacacatcgcgaccgcatcgacgccgatcgtgtcatgcttatccattgaaaatgcgagtttcagtttggtgccgacaccgtctgttccggaaattaaaacaggcttttgatacggaagctctgacagatcaaacattccgccaaaaccgcccaggcttcccataacgccgagccttttcgtgcgctccacgtgttttttcattcgtttgacggcttcgtatccggcttcgatgtcaactccggcatttttataagcatcagacatccctatcactccttgtcaattcgtttctcctaaaaaggcagaaagagaaaggcagcctgaattcccgctgcctttatgtcattttcacattttattttgtcagcaccgcttcttttacgtgaggaagcactgtatcctgataaatttccgtcggatatttgcccgtaaaacaagcgaggcattgtccgcaattggtgtcttcaaattttcggccgactccttttaacaatccgtctacacttaagaaagaaagcgtgtcggcaccgatgatctgacggatttcttccacggaatgagaagaagcgatcagctcctcatgggttgatgtgtcgataccgtagaagcacggatgagcgatcggcggtgaactgatcttgacgtgcacctctgtcgcccccgcttctctgagcattgtgacaatccggcggcttgtcgtcccgcgcacgatggaatcatcaaccatgacgacccgttttccttcgacaacaccgcggacggcggacagcttcattctgacgccttgctcacggagagcctgtgacggctggataaacgttctgccgacataacggtttttaatgagaccgagttcatacgggatgcccgtcgcctcggcatagccgatggccgcagaaatactggaatcaggcacgcctgtgacgacatccgcttcaaccgcggactcccgggcaagcattttcccgaggtttttccgggcgctgtgcacgttaatgccgtcgatattgctgtcaggtcttgagaaataaatgtactccatgctgcagatggaacggttgatattcatggaaaaacgctctgatttcaagccttcatcgttgatgatcagcatttcgcccggctctacctcacgaaggtacgttgcgccgacaacatcaaatgcgcacgtttctgaagcgaccacataagcatcgcccatgatgccgattgacagcggtctgagtccgttcgggtcaagcgctacgatcatctctgtttcagtcatgattaaaaaggcataagcgcctttcagcatagatagcgaatttttgatttgatccttcagcgaaaagtgtccgctgcgtttaatcagatgagccagcacttccgtatcggaggaagtctgaaaaatgctcccttggttttcaagctgctgcttcagctgtgtggcgttgaccaggtttccgttatgggcgagcgcgaggctgccgttgttttgcgaacggaacaggagcggctgaacattttcatatccgcctcctccagccgttgcgtaacgaacatgcccgatcgcgccttttccctttactttgctgagctcgccgttttgaaatacttcagtgatcagcccttggcctttgtgcgccgtcagtttttcgccgtcagtcgcgacaattcccgcgccttcctgtcctctgtgctggaggctgtggagaccgtaatacgtaatttgcggggcttcttcatgtccccagatgccaaacacaccgcattcttcattcaggcctttgatttcagcaagcatggaatagctcctttccacgcgcgctcaagttctttcgtttgcgcgtgaaccaattgttgtccgtcctggttttgaatcgccagaagtccgtcagccgttacctcaccgatatgaaccgcatcagccgcagccgcttcaaacgccgcttggtgttcttttttgaccgaaacgacgaagcgggattgagattcagagaataataatgccgcttccccttcaacagtcacgttggcgccaaggttttccgtcgtcatgacactttctgcaatcgctacgcctaagccgccttcagatacgtcatgcgcggattgaacgaagccttttttaatcgcgtcaagcaatgctttttggcgtgacagctctatatcaagatcgatttgcggcgctttgccgtaaatgcggccttctgtcattttttgcagttcgcttccggcaaactcaggttttgtttcgccgatcacgtatacaagatcccccgcttgtttgaaatgctgtgtcgtaatatgagcggtatcttcaattaagccgaccatgccgataacaggcgtcgggtagatagccgttccgttcgattcattataaagtgatacgttaccgccgatgacgggtgtgctgagaacattgcacgcctcgctgatgccgtcggccgctttttcgatctgccagaaaatttcaggtttttccgggtttccgaaattcagattatccgtgaccgcaagcggttcggcgccggagcatacgatgttgcgcgccgcttcggcaacggcgatttttccgccttcttctggatcaagatataaataacgggcgttgcaatccgtcgtcatcgccagcgcttttttcgtgccgcggattctgagcactcccgcgtcagagcccggagcgaccaccgtatttgtgcgcaccatgtagtcatattgatcatacacccactctttgctggcaattgtcggctgctgcagcagggcaaaaagcgtctctgtcccatcttttacttcaggcgcgggaacttctgtttcctgaaactcgcggtagtacgcgggttctgctgacggtttgtggtatacaggcgcttcttccgccagtgcgtcgaccggaagttcgcaaacaacctctccgttatggcggaggcggagcattttatcatccgtcacatgacctacggaaaccgcttcaaggtcatatttatcaaaaatatcgacaatttcctgttcacgtccgcgttcaatgacgagaagcatgcgttcctgagactcggaaagcatcatttcgtaagcggtcatacccgtttcccgctgcggaatgagatcaaggttcatttcaatgccggagccggctttgcttgccatttcagcactcgaacttgtcagaccggccgcccccatatcctgaatgccgactaaggcgtcgcattggatgacttcaaggcatgcttccaggagaagtttttccatgaaaggatcgccgacctgcaccgcggaacgtttttcttcagatgaatctgacatttcttctgatgcgaaagtagcgccgtgtatgccgtcgcggcccgttttagcgccgacgtacatgaccgtgttgccgacacctttcgcctggccttttttaatatctttatgatcaatcaagccgacgcacattgcattgacaagcggattgccctcatagcttgcgtcaaactgcacttctccgccgaccgtcgggatgccgatacagtttccgtatcccgcgattcccgccactacttcttcaaacaagtacttcacacgaggtgaagtgagttcaccaaatcgaagagagtttaatacagctatcggacgggcgcccattgagaaaacgtcacggataatgccgcccactcccgtcgcagcaccttggtatggctcaagcgctgacgggtggttatgagattcaattttgaacacgaccgcctgattgtcaccgatgtcaacgattcccgcgccttctccgggaccctgcagcacgcgttcgccgctagtcgggaatttgcgtaaaaccggttttgagtttttatagctgcagtgctctgaccacatcacggaaaaaatcccgatttccgtgtagttcggcaatcttccgataatagattcaatgagtgcgaactcgtcatcactgacacccatttgctgatagagtttctcttcttttatttgttctttacttggttcaagcagtagcgacatgagtttccctccaatttttcacgatagaccggaacaatgtaagaccgtctgcgctgccgagcagttcatcgactgcgcgctcagggtgaggcatcatgcctaatacgttgcctttctcattcacgacgccggcaatgccgctgacgcttccgttaatatcgccgccgtatgtgaagacgatttgattgttttcttttaatctttcaagcgtttcgtcatcacagtagaaattgccttcgccgtgggcaaccggaatcgtaatcgattgtcctttttcataggaagatgtgaataacgtatcgccgttctgtacgattaattcaaccgggcggcagatgaactttaaatctttgttgcgtctcatggcgccgggcagaagtccgagctcctgcagaatctggaatccgttgcagacgccgagaaccggttttccttcggcagccgcttttttcacggccggcatgatgtttgcgaatctggcgatggcgccgcatctcaagtagtcgccgtatgaaaacccgccggggatgagcacgccgtcaaatccgtcaaggcttgtttcctcgtgccagacatactcgacttcttcgccgagttcgtcctttacggcgtgaaacatatcaatatcacagttggagccgggtaacacaatcaccgcaaatttcactgtgcgacaacctcctcaacttcatatcggtagtcttcaatgactgtattggcaaggagcttttcacacatttctttcacgagcgcgtcaagatcgcggtcagatttttcgatcgtcagctccatgtattttccgatgcgcacatcctgcacttcattgtaggtcatgctgtgcaatgcatgctgcactgcgcttccttgaggatcgagcacactttcttttaagctgacataaactttcactttatacattatgaaatgcctcccagtcttttgaaaatctcttcgtatgcgtcggttaagctccccaggttccgtctgaacaaatctttatcgagcttttcgtttgtgtctttgtcccacagacggcacgtgtcaggagaaatttcatccgctaaaagcacccgtccctctgcgtctaagccgaattccagcttaaaatctattaatctgaccccgcagtcttcaaaaatatgctgaagttcttgattcacctggtttgtaatcgatttgatcgtttcgacatgctcaggagccgccgcttttaagagccggatatgatcttctgtgatgagcggatcgccgagtgcgtcatccttgtagtaaaattcgataatcggctgcgggagctctgttccttccgggatgccgagacgtttcgacatgcttccggcggcaatgtttctgaccacgacttcaagcggaatgatgctcacttttttgatgagctgctctgattctgaaacacgctccacaaagtggttgtcaattcctttggcgtgcagatgtttgaaaatcaggcttgaaatttcattgttcagacggccctttccgctgatctccgcttttttctcaccgttaaaggctgttgcggaatccttgtagaccacgcggagaatctgttcgtcttcagtttgataaattcgcttcgcttttccttcataaagaagattattgttcacaatattcacggaaggcctcctaacccgaatgttgggaatattcaatctacggcggctgaagaagccgcctccggctggcttcttctataaacctaaacgctcaaagatcaagtcgacgtttttcagatgataattgtagtcaaagcaatcggcaatctgttccggtgtgaggcgggacgtgattttttcctccgcttcgacaagctggcggaacggcacttgtttttcccacgcttccatcgctttcggctgaaccgtgtcatatgcttcttcacgaggcagacccgtgtcgattaaagcaagcagcacgcgctgagaatagattaaaccgagtgtgcggtccatgttgcgtttcatattttccgggaataccgttaagtttttgacgatgttgctgaatcggttcagcatgtaattcagcgcgattgtcgcgtcaggaagaatgatgcgctcagctgatgaatgagaaatatcacgctcatgccataacggtacattttcgtatgccgtcagcatgtacccgcggatcacgcgcgccatgcccgtcatattttccgacccgatcggattccgtttatgaggcatagccgatgagcctttttgtcctttagcaaaaaactcttccacttcacgtgtttcactcttttggagaccgcggatttccactgcgaatttttcaatgctcgtcgcgatcaaagccagtgccgccatgtaatccgcatgacggtcgcgctgtaatgtctgagtggaaatcggcgccgctttcagcccgagtttttcacagacatactgctctacgaacggatcaatatttgcatatgtgccgaccgcgccggaaagcttgccgacttcgatcccttcttttgcctgcttgaaacgttcaaggttgcgtttcatttcttcgtgccaaagcgcgagcttcaggccgaaagtcgtcggttccgcgtgtacgccgtgcgtgcggcccatcatgaccgtgtatttatgttctttcgctttttcttttataatgtcaacaaatctctcaatgtccttgagcaagatctcattcgcctgttttaatagataggaaagagcggtatccacgacatctgttgacgtcaggccgtagtggacccattttctttcttcgcctaatgattctgaaaccgcgcgggtaaatgcaacgacgtcatggcgcgtatcctgctcgatttccaaaatccggttgatgtcaaaagacgcgttttcgcgcatgaccttgacgtcttctttcggaatgacgccaagctcagcccaggcttcacaggctaaaatctcgacttccagccatgcctggtatctgttttcgtccgtccagatcgcggacatttcaggtcttgaataacgttcgatcattatgctcgtcctccgtctcttttcatccatatgttcgtgatgtcctgaatccatgtttcatcaggcttccgcaaaaatgtcatatgccccattttgcgcccttttttaatctcatgttttccgtacaggtacagtttggcttcttttaaaagctccgtatgctcctccgcaagcttcacttcctcaccgagcagattcaccatcattcccggtttgagaagatcggttctgccgagaggaagtccgcagaccgctctgatgtgctgttcgaattggctcgtttcacaaaggtcgagcgtataatgcccggagttgtgaggacgcggcgccagttcattgatcaaaaggtctccgtcttctgtgacgaacatttccaccgcaagcggcccgacaagctccaatttctccgcgagctggacggcaagcgcctctgcccgcttttgaaccgtttcctccgctctcgcgggcacgatgctttggaacagaatattatttttgtggatattttcagcagccggaaaggttgaaatctcaccgtgcaccgatctcgtcacgataacggaaagctccatccggaacgatacccagctttccagtatgcacgtgccgttttctagcagcgcggccgcttcgtctgtctgtccttcttccttaatgacaaattggcctttgccgtcatatccgccgcggcatgttttcagcaccgccgggagccccagtgcctgaacagcttcctcaagctcccgtccgctgtttacgatccgataaggagcgacttgacagcctgctgactggatcgcctttttttccgtttccctgttttgggtgataagcagcagctcgcttccctggggaagatatgcatgttctttgagccagttgagcgcctcgtaatcgatattttcaaattcgtacgtaatgatgtcactgactccggccaatttttgaatcgcttcacggtcattgtactgggcggtaatctcaatatcggcgatctgtccgcatggcgagtctttcacgggatcgacgactgcgactttatagcccatctgttttgcggcgacagccatcatttttccgagctgtccgcctccgataatgccgatgacggcgccgggataaatcgtttttttatcagacaagctgatcactgctttccagcaccgtttgttttgtcgcatttcttctcgcctctagtttatccgcaatgtcaccgtcaaatgccgacaaaatctgcgcggctaacagacccgcgttcactgcgcccgcttttccgatcgccgttgtcgcgaccggcacgccgccgggcatctgtacgatagacagaagagaatcaagcccgttaagcgattttgtctgaaccggtacgccgatcaccggcagtgtcgttttggccgccgtcatacccggcagatgcgccgctccaccggctccggcaataatgacttttaagcctctgtctctggcgctttctgcatattcaaacatcaaatcaggcgtccgatgcgcggatactacctgtttttcataaggaatgtgaagttcgtcaagtatgtcgcatgcatgtttcattgtctcccaatcggaggtgcttcccatgatgattcctgctagcggctgcattctgttcccaccttctcatgctttgtttttcagaaaaaaaagcccggcttatattgcaactatgaggaagcaatacaaaccgggcatggcgcgcgtatcgtcagtcgttcgcttctgcgatatccatgtcagctgtttatcactttcctgcatagtccggccgtttacggcagccgggtagaaacttatgggccatattcccaagattatatgaggtcgtgttttgatttcatgtttatcttaacaacggacttggataatgtcaacgacattatcgaacgatataaaaattctttcttttaatgttcgtgtttagatcaatttcccttcaaatacgatttttttcccgcaaggaacgacttgaattgatccattttctttcttttctgtaaagatcggctcttccatccgccggacgggcatataaccctcttccttcattaaagtgagaatggtgtcaatcgtttcatgttccgttacttcaaaccgtttcttttttggctttgtcattccttaattctcctcttcttcactgctttcacccagaatccgccgtggatcgttttcggctcaaaggcgatgataaacgctttttcatcaagcgttttaatcgtatcatacagctgaagctcatatttgcgcggcgtcagaatctgcatggcggtccggtctccttcaagtccgcccgcaacccagcttgtaacaccgtatcctttttcccggagctgtttcggcaggtccagatcgagctccttcgtaatgacgttgactgttatgtagccgagcgccagtttttcttcaattttcattcccactatgacgccgaggccgtagccgagcgcataggcaatgacgttttgaatttgattcagattgtcgagcacaagactcaggccggtcacatacacaaggatttcaattgtactgatgcctgcggcgaaatagcgctgtccctttaatgtcagaatcatcctgatcgtaaagaaagagacatatataatgttaatgatgagaataatgagaaccatacctatactgttggataaaattgtctgcatcactgattcccctcctctgactttgaaaagccaatctttcaattaaggatagtttaccctcttttcatcattttcaaaagaaaaaaaagcccgccccgcaaggcagactctcaagctcttatcagtgaagctcggcttttttcaatcgtttgacggcttcatattccttctcaagttcactcagcgtgtacccggacagttcctgaacatggtcttgataaaaccctgagcggatcagttttgtcctcaggtgctgttttttccgattaatggcttctcgcaacaacggggccatcttcatcatccctttccgaatcataaagagtagtgccgctttcgaattgctgttgctctcatcatatctcggccgggtcctcaaaacaacacgcttcattagaaaaatttgtaaacattgtgaaagacaaatttcgacttataaaggaatcagcgaagcagtaaagtactcggaaatgagcggccatgtcacagccgtaaaaacgagcatgatgatgaccgccgcggaaatacagtacatcacgtcagccgcaggcttttcagccgatttgtatagaatctgcacaaactgcaccatcgccgaggcggccagaaacaaggtcagcgccgtaaacaccacggtgatgaccggcagattcaatatcgcgaaaatcatccacacgatagagcaggcgacagccggaaccaaaagcgatccgacccccgcggccgcatcccgcatcgtaattttctgcttcatcatataacgtgatacaagccagaccgcgccggccgcagcggcaaaaaagacgagcgtatacacgagaacgacggtaaagccgtcaaaaaacgtatgatgccgctccccgtatccgagaggcctttgctggcttgccctcagctgaaaccaatttccgattgagaaaaagatactgaatacaagcattgaaataagagcatatttaaagcgggaaaagccgtcttccccaacgaccttcaccggtgatgtcaaaatgcgcagcgcgaaacggcaataacgtttgaccgcggcccatgcagaagcgagtttttccgtaaaagccggagccgggcgccgttccttttcttttttcttttgcttttgataacgtcccgcatttctggacattctcgacagcggttcttcatcagttccctgatgctgtttttcttcttccaacgtttcttttctttcttccgtcatgtcagcaactcctatcaaaaaaatacggcggaatttgtttagcaagaaaataaaacacttatataaggtaccgaagcggccttaaacagtcaagcggttttcttcacccggacacccacatgacgttttatattatgtattggttttacggaataggacaaaaacaaaaaaccggctttccccagccggtttttccgttatttcaagaagatgaaatacaggataaagatgacgaacagcccgtacataatcgggtgaacgctttttccttttcctttgcagatcattgtaatcgggtagaaaataaaaccgatcgcaatccccgtcgcaatactgtacgtcagcggcatcataatcatcgttaaaaatgccggaacagccacctcgaatttatcccaggcgatcttaccgagcggcgccaccatcagcgcgccgacgataattaaagccggagccgtcacattcgtggtgacaactgacagaagcggcgagaaaaacatcgccagcaaaaagagaatgcccgtcacaacagccgcgaagccggagcgcgcccccgccgcaacgcctgagctggattcaacataagaagtcgttgtagacgtaccgagcacggctccgataacgattgatgttgaatccgccaaaagcgctcttcccgcacgcggaagtttgttttccttcatcagcccggcctgtgtcgctacagctaccagcgtaccggccgtatcgaaaaatccgacgaacaggaaagttaaaatgacaatcagcatttgtacggagaagatatccggaaggtgcatccacgcctgtccgaaagtcggcgcaagactcggcacgctgccgacaatgtgtgtcggaaccggaatcagcccgcagatcataccggcaaccgccgtcaaaagcattccgataaacacgccgccgtttacgcgaagcaccatcagaatgaccgtcacaataacaccgaaaaccgtcagcagcacagggccgctgtgaatattgccgatagacaccaaagtcgatgagttcgcttcaataatgcccgaaccctgcaaaccgacaaatgtgataaacaaaccgatacccgcgccgaccgccaatttcagctcaggcggaatcgcattaatgattttttcccgcaatcccgtcagtgaaagcgccacgaagataattccggaaatcaagacgccggaaagcgcagcctgccatgaaatccccatgccgagtacgacagagaaggcaaaaaacgcatttaatcccatacccggcgcaatcgcgatcggatactttgcaataagccccattaaaatacagccggccgcagatgccaaggctgtagcggtgaacaccgcgccctgatcaatttttaatgcttcgggaaatcctttcacaccgtttaaagacaatgtcagcggattgacgaacagaatgtacgccattgacaaaaaggtcgttaaaccgccgatgatttcattacgatagcttgtccccagctcatcaaactgaaaaaattgcttcaagccaattgcctccttcattctctcccatttattctgcccgttatccgccaaataaaaaacgccccaaatacatttgggacgcttgactacatacgttcagtctgaataaataagaatggattatttatatcaaacgattgagattgatccgtagtcaagccatttacggtagcttggtagaaacttgcgggccatatccccgccattatacgatatctgcatatttgatttctgagtctattgtatcaattcaattttgaaaactcaataaaaaaacgaacaatccagttaaaaaaaattggtttattcgttaattgaccaaaaatggaagacggcaagggccgccttcccggcatcattttccgttcgcaggccgaaccggcaccgcgaatgtgatccccttgtcatccgccagcaagttcataaccgtttgattgacgtacaaagcatatgaatcgaatgagaaatcgcgcaatgaatagtctttatcggatgaatcatctaattcaaaaacggattccatttcaccctttttaagattcgtgactttcgccttattccctttcagataatagcctttttcatactcattaagcgatggccaagttttcatttttttcgtattgccgagaccgattgattcaccgacattcatcagctgatctttatccgctttgctgtaattaattcctgtgaattgataatcgacgatcacccgtctgtcttgctgtttgatctttttgatggtaatgccgacatgatgatgtttcgttttataactgacgggcagttttgttttcagaggcacgatttctcccggctctgattctgtttttatatcacccgttatgaaaagtgttttcgctttcgggtctatcggtttgctgaattgagtttggccgcgtattcttttcccgccgccgggaagattcttcctgccgccaagttcaatattcgacatcgtcatttcataatggtttccagcatcatccgttgcttcgtcaatcgagatggcatcatttttggctgcatcatagaagtcgatagaatacaggagagccgatcccatcgttccgttttccgcccggatatcgaaaaagcggtataatccgtgatttacattcacagctttcgttccttcaagagaaacggacttttgttttttaatagggagtgtaaagcgccagtttccggggatatccttgatttgtgtaatgacaagcggaagcttatcaccgtctttcagctttgagccgtccgtgaacaggcgaagctgccccgcgtaccgcccgtctttcatttttttcatatcactgctgtcataatcctctgctaacatattccgtggatctttataatcgacttgaaaagagatgctctcctcatctgatttcaaattatcaacgataaagttataaacgagctgtccgctgtcgtaatacacacttttcactgtcaccgtgattccgcgtgattccgctttttcgttcagttttgtcaccaaattgcttttaaacagcgcagaacctgccttatcctgaaacagactgtaaatttgtccggcaacaggaatgtttcccatagcggtgttaacggagggcatgaacaagcctgaggacagatacagaataaacagagcagcagcaaccgcgaggccgtttatcacttttcgtccccatctccgtctgacggcgccttcttttccggcacggacagcagcgctgtgtatcacgtttttcaactcagctttcggcacgtcaatgtcctgatacaattgcttcatttgatgcttttccatatgtgtttatcctccttttccagttcctgcttcaatgcttttctcgccctgtagagatgcgtttttacagtgccttccgccataccggtctgttcagcgatcataccaatcgagaaatcttgaaaataataaagctgaatggtcagctgtatatgttcgtcaagcgtttccagagcattccgaagatctatgtattcttcaatattcttattctccgcgcgcgtatcgtgctgcggctcaaacggaatgacgtctccgtgctttttcctcatcgcaaaaatcgtatgaagcagaatccggatcagccacgttttaaaatatttcggctccttcagctgtgcgatatgaagaaaagccttgtaagccgtttcctgaacagcgtccagtgtatcttccttgtgatgcaaataaagataagctgttttatataaagtctcctgatgggttgtgatcagtttttcaaaggctgcggcatcaccttttttcgcctttttgatcaatcgttcttccttcaccttatccacctcctatgctgttagatatgaatcggggcaaaacggtttcaaaaagatgaaaaaaaacgcctcttttttaaaagagacgttttttatcttcatttattcccactcaatcgttgcaggcggcttgctcgtaatgtcatacacgacgcggttgatgtgtttcacttcgttgacgatccgtgttgaaatcacttcaagcacatcccaagggatacgcgcccagtcagatgtcatgccgtcaattgatgttacggcacggataccgattgtgtaatcatacgttctcgcatctcccatgacgccgacgctgcggatgtcaggaagaaccgtgaagtactgccagatgtcgcgctcaaggccgtggttcgccacttcttcacgcagaatcgcgtctgattcacgaacgatttcaagtttttcttccgttacttcaccgagtacgcggatgccaagtccagggcccgggaacggctgacgccatacgatatcatccggaaggccgagctctgtgccaagcgcgcgcacttcgtctttgaaaagggtgttcagcggctcgatcagttcaaactgcatatcttcaggaagtccgccgacattgtgatgcgatttgatcgtttgcgccgttgcagtaccgctctcgataatatccgtgtaaagcgttccttgcgcaaggtaatcgatgcctttcagcttgtccgcttcatcatcaaatacgtaaatgaattcgttgccgatgattttgcgtttttgctcaggatcagaaacacctttcagcttgtttaagaatctgtctttcgcatcaactttaatgacattcatattaaagccttcgctgaacgttttcatgacgccttcagcttcgcctttacgaagcaggccgtgatcgacgaaaatacaagtcagctggtcgccgatcgctttatgaattaaagcagccacaacagaggaatcaacaccgccgcttagcgcgcaaagaacctgcttgtctccgactgtttcgcggattttttgcatttcgatttcgataaagttttccattgaccattcgcctttacattcacaaggcccgaagacaaagtttttcagaaggtcatttccgtattctgaatgacggacttccggatggaactgcacaccgtaccattttttgtcttttttgctcatcgccgagttcgggcagtgatggctcgtcgcgtctaccgtaaatccttccggcacttgtacgactaagtcgccgtggctcatccagacaacttgttcttccggaagatccttgaacaagtctggagttccttgaatctgaatgttcgcttttccgtattcgcgctggcttgccgcctcgactttccctccgaggtaatgagtcatcagctgcatgccgtagcagatgcccaatacaggaatatcgagttcaaagattttttcatcacagcggaaagatccttcatcatatacactgttcggtccgcctgaaaggataattccttttggattcatttctttgatttcctcagctgtcaacgtatggggatgcagctcgctatatacgccaaattcacggatccggcgggtaatcagctggttatactgactgccgaaatcaagaacaagaatcatttcattcactaacttcgtcatggttgtcacctaatctcctctaagtttttgacacagaaaaaacggaggacacacgttcagccctctgtcggcaagacttgtccggaagcccggctttttaacgctcccgggctcccatttaacattcatatattctaacaacaggacgatatgcggtcaagactatcttcttttaattatattttcccacaactgtcccgattcattccaaagctttgcggcattatcgctgcggtataaagcacgctcatagcgcagcgtcagctcggacatgtcgtttgtatggtgcgcctcatcaacccttgcggcaaaatcgcggagcgtttctccgtctcccctgctgaacccttttcgtttcagctggcggagcagcgcggcatatgcgtcgaaaaagacgtcttcatccgttcgccgcttcaatccggctgctgtaacgtgcggaatccagcgcacccggaacagccaggcgagtgccgccgcggctgaaattacgatgacgatggctgcatacggccacaggtgtgccgcggttttgttgcggatcacaggctgcggtgccgcgctgtgatcccgctttttcggtgtttcttctttttccggctttgtttcctgacgctgcttgtcagacggtgaatccgaattccccgctgagcctccgctgtcttttgccgcggtatgattttgctctgacgtaaactccgtcggattggtgaagccttttgtcggctcaaacgtcacccagccctgatcgggaaaatacacttctacccacgaatgggcgttgttgtttgtgacttcataaatgtggccgttatggtcgcctgcccctttatattcaccggatgtatagcccttcacccagcgggcgggaattcccgcagagcggagcagcacggccattgccgatgaaaagttatcacaatatcctcttttcgtttcaaacagaaattgatcgacataatcctgattgtgctccggaaccgcgacatcctgtgtattatacgaaaatgcggaagatccgagataatcctcgatcgccttcgctttatcgaacatattatgatgatcccgcgtcaatctgtccgcaagctgtcgcactcttcccggaaggctgtcggggacctgtaaataccggtcattgaattgattctgctcacggtatcgtttcactttcacttttctgagatcattcagcttaaagacgggcgcctgaaaagtcaccgtgtaccgtcccatattgcggatgttgcccacttgttcactgaccggcgtaatttgctcggtgtttccgttcatttcaagctgaatcgagtgcttcggtttaatattggagacgccgatcggatacatgacgtgattatagagataattctcatcaatggacacctgtgccgtataccgtctcgtctgcacactccggtcaaaccatatatcttccacattgccgccgttcagtttataggacatgccctgatcggtctccacccagcctttccccgtgtatgtatctttcgtttccacccggaagtacgcccgttcttttcccttccatgtaaaaaccggcgtatcatcctcctgaaaaggaccgcccaatgtttcatcatgattgccgtagccgattttactttcggcggcgggcacttctttgtggtttgtgattttttttagaaacggcacgggatccggccagttcgggtctgatttcggagccgccagaccgaacactacggaagcgcagataaacagcatcagcggcagaaaccatttgagtatcaatctttttttaaacgctatgtgttccgtaagccggatgcgctccatatacaaaagccccatcatcaaaaagccgataaagacgatccggatgacggcgtacgcggcatcataaggagtaaacgtatcaagcacggtgatatacgccaccgtcatgataaaaaagaataatattttccgctgatagatcacccagtaatgcagcaaatacacgagcagccataaaagcacaaaaaacagcaacgtgcggaatgacggattcatatcattccatcttccggttccgatgtggcgggcattttgcatcacgtcccgcaaaaaagaaacgagccattccggctgaaaaatagaacctttataaaacaggatgtgaatactgatcaacgtaaacagaatgcaggacggcacggtcacgtaccacctcatccggaagaatgacagcagaaatgccaaaccgataaaaacgatgaaaaaaccggtatgttttgtatccgtaaaattgtgcagcggcctgagccattcccataacaataaaaaagcgagaaaataaaacagcagcagactcagcctgcttccctggttctcgtcatgcggcatggcgcgccacctctctttctaaacaacatgggacacccgtttgtccctgatcatttgcaccttaatatttttctgagcgaagatgagagcgagtttccgttctttctccgaaagcgcggcattcgtttctttcgccaaaaacaccgtcatgtcagcacggccgggctcagcctgtttgagaaggtcttctgtaagactgcccgtcacgacggcaatggaagctttacccagttctttccctaaacgcccgcctgcatcggcttcttccgactctgaagctgatgccaggtaacgcagcatctgtctgaaatgccgctctccctcccggacgggaaatacagtccggtcgctccccaatgaaataaatcctgcgggagagcccttcacaagcgccgtgtaaagcagggatgccgaagctgacaccgcggcttcaaacgaaggggacggcctgcagtccaaaaggagaatcatattcatactctgcaacgggtcaaattccttcgtcatcagctcatttcgacgcgccgatgttttccagtcaagtgcggaaaaccggtcgcccggctgataatttctgacgctcgcagccattgctgtgcggtgtacctgaaacggagcgccggcacccgcaccctcttctccggatgcagcctgcggcttatagtgaacaggcccgtacgccgggaaaaccagaaccgtatccgttacggaaaacgacgccgtcttgtccaaaagcccgagaacatctcccgtccgaactctgatcgtatgtaaatgatgctctccgcgcggcacctgcggcagctcatattgtaacgtcatcttcctttgaaaccacggaaacacaagctgtttcgcactgcgcctctcaccaagcgtttccggcatcacatcttcaatgaccatatatgtcagcggaaacggcaggcgcctcgtcagcctgatggtggcagacagcctgtcgcctgaggttaactgggcggaggacacgtcacgcgtcacctgaaacgcccgcaacgggtacacagcgaccagcccggcgtaaacggtaaacggcaaaaacgcataaaataaaaaccagctcacaaatccgccctgaaacatggcataagaaaagacagccgccgtcagtacggccaacataagcagcttccagccatatagaagccaatgcatcttctttctcattagcggaccgacatcctttgaacgggaactttttccgtttgcatgatgtcttctataaccgcttccggcgtcacatcgttaaatttcgcctcggcggtcaagatcattctgtgcggcagcgtatacggagccaaatactggacgtcatcaggaatgacgtaatcgcggtcatgaagcagcgcgtacgcctgcgcggctttcattattgaaattgaaccgcgcgggctgacgcccagatgtacggacggatgccggcgggtatgctgagtaatgccgacgatatacgctttaactccatcatccacccgcacctgctccagtttttgctggagggtgatgaactgttctttagaaatgacgggctcgattgtttcaagcggattgcgcccttcctgcaaagacagaacccgaagctcctcctcggcagtcgggtagcccatgcgcagcttaaataaaaaccggtcaagctgggcttcgggaagcggatacgttccttcatattcaaccgggttttgtgtggccatgacgaaaaacggctcagccagccgcattgtctttccgtcaatcgtgacattcccttcctccatcgcctcaagcagggaagactgagttttcggagaggttctgttaatttcatcagccagcacgatattccccatgatcggtcccgggcggtattcaaattccattgttttcgtattataaatagagacacccgtcacatctgacggcagaagatccggcgtgaactgaatcctcttaaagtcagctccgatcagcttggccaaagcccggaccatcatcgtttttccgactcccggcacgtcttccagcagcacatgcccttttgcgagaatggcggccagactgagtatggcgatatcccgttttcctatgatgatgttttcaatatgctcaacggctttctccagcagcggatgcagctcttctttataagccattcttctcctcctagtcatctctcaaatttcaattatcgtaacctaactttaccacaaaatataaacagtataaaaaaacgtttccagcgaattgtttccagtccgaaaaaggaaaaaagctccctttagaaaggaagctttatttcagctggagaggctccatatgaacgtgtgaatggtcaatggcatgttcctctttcatcccggcgccttctgctgtacgaatgcgaaaaaaatgtcatattttcttacatcattttcaactgtctgtggcatttatgatagaataatacttgtctgaatattcagcataaacaaaccaaaaggaggcaaagaatgaatcagcctaactctttatctaagggattaaaaacccggcatatgaccatgatttcaattgccggcgtgatcggcgccggattatttgtcggaagcggatcagtcattcattccaccggacccggagcgattgtctcctacgctttagcaggattattagtgatttttattatgagaatgctgggggaaatgtcctccgtcaacccgacaagcggttcgttttcacagtacgcgcatgacgccatcggtccttgggccggttttacgatcggatggctgtattggtttttctgggtcatcgtcattgccattgaagccattgcaggcgccggaatcatacagtactggttcccgggcattccgttatggctgacgagtctgcttctgaccgtgctgttaacactgacgaatatttattcagttaaatcgttcggcgaatttgaatactggctttccttagtgaaggtagcgacgatcgttgtcttcttaatcgcgggatttgcgttcattttcggaatcgttcccggcagcaagccggtcgggctggaaaatttggcgggcagcggcggatttttccctaaaggtccaagttccgttctgctcggcatcgtcgttgtcattttttctttcatgggatctgaaatcgtcgcaatcgcagcgggagaaacgtcaaatccggtcgaatccgtcacaaaggcgacccgctcagtcgtttggcggatcattattttttacgtcggctccattgcggttgtggtcacactgctgccatgggattcagccaatattttggaaagccccttcgttgccgttttgagccatatcggggttcccgcagccgctcaaatcatgaatttcatcgtcctgacagccgttctgtcctgcctgaactccgggctttatacgacgtcacggatgctgtattcactggcagagcgaaatgaagcgccgcggcgttttatgaaactgagtaaaagaggcgtaccggttcaagccattatcgccggcacctttttttcctacattgccgttgttatgaactacttttctccagactccgtatttttgttcctggtcaattcatcaggggcgatcgcactgctcgtctatctcgtcatcgccgtctcacatctgagaatgagaaagaaaatcgaacggacaaaccctgaatctcttaaaatcaaaatgtggttctatccgtacttaacctacctgacgatcatcgccatttgcgccatcttgttatctatgctgtttatcagttcaatgcggtctgaatttctgctgacaggatttattactctgctggtacttgcctcatatgtattccgcaaaaaacaaaaaccgaaagagagcgcttccgaaagccgggttgcgcaataaccgcaaacaccccccctcaaaaaagggcgggtgtttttttaaccaacctgttccaggcagcattaactgtagtacaggatttcaataaatgataaggacaggatgaaaaatggcactagaaaaatttgcagatgaactgccgattatcgaaacactccagccgcagaagaaatcagacggcagcacgtattacgaagtcaccatgaaggaatgctttcacaagctgcaccgcgatctcccgccgacccggctttgggggtataacggtttgtttcccggcccgacgatcgacgtgaacaaagatgaaaacgtctatattaaatggatgaatgacctgccggataagcattttctgcccgtggatcataccattcaccattcagaaagcggccatcaggaacccgatgtcaaaaccgtcgtccatttacacggaggagcaacgccgccggacagcgacggctacccagaagcctggttcacaaaggattttaaggaaacgggtccttattttgagaaagaggtataccattatccaaacaaacagcgcggggctctgttatggtatcacgatcacgccatggcgattacgaggctcaatgtgtacgccgggcttgccgggatgtatatcatccgcgagcgaaaagaaaagcagctgaagcttccctccggagagtacgacgtaccgcttatgattttggaccgcacgttaaatgacgacggttccttgtcttatccaagcggacctgctaatccttccgaaacgctgcccgacccttccatcgtcccgtttttttgcggaaataccattctcgtcaatggtaaagcgtggccgtatatggaagttgaaccgcggacatatcgtttccgcatccttaatgcctccaatacgagaacattttctctctcgctcaataacggcgggaagtttatccaaatcggttctgacggcggactgcttccccgctctgtcaaaacacaatctatcagcttagccccggccgagcggtatgatgtgctcatcgatttctccgcctttgacggagaacatatcattttaacgaacggcaccggctgcgggggcgacgtcgatccggatacagacgccaatgtgatgcaattccgcgtcacaaaaccgctgaagggagaagacacaagccggaagcctaaatatctttcaacaatgcctaatgtaacatcaaaaagaatacacaacatcaggacactgaaactcacaaatacgcaagacaaatacggccggcccgttttgacgctgaataacaagcgatggcatgatcctgtgacagaagcgccgaagctcggcgcaacggaaatctggtcgattatcaatccgatggggggaacccatccgatacacctgcaccttgtttccttccaaatccttgaccggcgtccctttgacttagagcgttataacaaattcggcgacattgtgtatacaggccccgccgtcccgcctcctccaagtgaaaaaggctggaaagacaccgtgcaggcgcactcgggggaagtcatcagaatcgcggcgactttcgctccttacagcggacgctacgtatggcactgtcatattttagagcacgaagattacgacatgatgagaccgatggacgtcacggataagcagtaaacaaacatccccccctttctccagaaggggctttttttatttatccaaaaagaaaaaataagaaggcgcttttttgcatatactgtaataacaggaagacgatgcaccctcattggaaatctggatagaaaaaggaattaggagattagggaaaagtatgagacaatgaaggagtgcacgaaaattcataagggaagaagtgactttatgtcttactacaacaaacgtaatcaggaaccgctgcctaaagaagatgtcagtacgtgggaatgcacaaaagaggactgtatcggctggagcagaaagaattttgccggcagtgataccccgacttgccccctttgcggcagtaaaatgatcgacggcgtccgttcgttggtaaatctccaaaacaataatcaaacggcatcaagttagacctcccttttacgagtctcaacatagagaaggcctccatgtctcatgagaggcctttgcgttatcatgtccttttatgatgcaaaggagcaatgaacatgaaaaacgatcggcagcagaaagatctgaaggaaatggcaaaacggcggaaaatgaaccttgccgcacagtcattcatcgaaacgcttcattttgccgttccgattctccgttttttcaaatggctcgcctcagccgcagccagctttgttcatgaaaaaacacccagcgggcgctgagtgtttttttcatgattggatgacggaaaaactattgataatgccgtggtcattttcccagactttttcgcattttttcgtatccaaatgataagcataaatggtccggaccttcgcattccgccccgtttcatccttcagacgcttagcgccttttgcttccgccatgaaataaatgatgctgccgtctttagaaaactgaggctgggcatcaatcagcggagcgaagtccttcccgtttgagataatcgttttatcttttttcgttttgacattcatcagacggatggacgctttttgttccgtccctttttgtgtataagatgtaaagacaaggttctttccgtccggtgacaccgccacgccgctgataaactgttcaaggtttgtcaggtcctgaaggtgttcgccagctcctgctgcaaaccggatattcgtcggttcagggtcaatccccttctcatttgcctcatccgttttttgataatcctctttgacggaataatgcagaagcgcaaaatcgttttggctgcggttataaaagaagctgcttacactgtcgtctttctcatcggcggcaggatacagattttcataacgtttcgttttcaaatcaaaagatgcgagacggaaaatatcttcatccgcttttccgagacggaaataaatgtgcgtcagatcctttgataaaaacagactgtcagcgcttgccgttcctttataaagcaccgtcttctttttcgtcttcagatcaagcttatacagacgcatctcattttcgtcattattcccgacaaaatagagcacctgatgggcgtcatccagcgcaaacgccggatatgccgaaagcttttcctcgtacagcacgcggccgtcctcgtaatatttcgtcatcagatctttgtctgtaatggaaacaagcagcttgtcatggccgccggagacaacggcttttccgccgccgtcgctttttcctttgatcagtaaaacggacgcgatgaccgccgccgccaaaacggcggcaagcaacatccagatccatcgtttcttcttcattatcaatctctccgtcaatcagaaaaagcaagaatcagagtccttgctttttaagatggtctattttaatagctgtagtgtccggatactcttcctttgcttaacggatatccgagcgctttgaacgctttcgggctgacatccaatacggcattcggcagacggcctacatcatttttatatactgtgataaccttttttggttttgctttcgcataagctctgattttcgttccgtttctcggaacgtcaaatcctaattttgtcgcgcaatcccagtgtcccagttttttaccggaagatccttttttaccgactccattataccatgtaatatttccgttcacttttttagcacttgcatcagaagagaaactgatcgctcccagcgtgcttcctgctaaaatcaataaggctaagaataacttcttcaagctttcgtcctcctgattctttattctaggcaaaattatacaccaagaagacgattataatatttcaatcactttacatgttcattacaacgtgatgagacatgcacataacgacggcacaattacctgttctatataattccatggtaaattatactacaaaatttaattcattagcgttataatattcatagagtatttctgcattcaatatggactttttataaggcctattgatagttgcataatatgatatattttgagaaatcaggctttaggaagcactttattccttttaaccgtggttcatattgatcatgtacctatactcgtttcaatcagactaggagtgataatcaatgaaagcggcaagatggcacaatcaaaaagacattcgaatcgaaaacattgatgaacctaaagcagaaccgggtaaagtcaaaattaaagtcaaatggtgcgggatttgcggaagcgaccttcatgaatatttgggaggcccgatctttattccggtcggcgaacctcatccgttaacaaacgaaatggcgcccgtcacgatgggtcacgaattctcaggagaagtcgtggaagtgggcgaaggcgtcaaaaattacagcgtcggcgaccgtgtcgtcgtggaaccgatttttgccacacacggacatcagggagcctataaccttgatgaacaaatgggattcttaggcttagccggaggcggcggcggattttctgaatatgtatccgttgacgaagaattgctgtttaagcttcctgaagagctttcttacgaacagggcgcgcttgttgagccgtcagcggtagcgctttacgccgtccgccaaagcaaattaaaagcgggcgacaaggcggcagtttttggctgcggaccgatcgggctgcttgtgattgaagccctgaaagcggccggcgccacagatatttacgcggttgaactttcaccggaacgtcaggaaaaagcgaaagaactcggcgctatcatcattgatccgtcaaaaacggacgatgtcgttgaagaaatcgctaaacgcacaaacggcggcgttgatgtttcttatgaagtaacgggcgttcctgtcgttctccgccaggcgatccagtcaacaaacattgccggtgaaacggttatcgtcagcatctgggaaaaaggagcggaaattcatccgaacgatatcgtcatcaaagaacggaccgtaaaagggattatcggataccgtgacatcttcccttccgttcttgcactgatgaaagagggctacttctcagcagataagctcgtcacgaaaaaaatcgtgctcgacgatctgattgaagaaggcttcggcgctttaatcaaagagaaaaaccaagtgaaaatcttagtcaaaccgaactaaaccgttcagctgaatatcagacacatccgaaaaagagccgttccggctctttttttcatctcatcgtctttccttccttttccttttaaaaatgatcccctctgcgcaaactatttttcaccctgtcccgtctatccttaggcagcagcctatgatacgtattttttaaaaaggagccctttgaagcaatgaagaacgaaacagccaaagcgtcgcttgtgacgtgcataactgagcgcaaggaagacttttaccggcttgcgtacagttacgtaaaaaacaaggatgacgcgttagatattgttcaggaatcaattcaaaaagcgctgacatcggtcgaatccgtcaaaaaccccgatgtgatcaaaagctggttttataaaattttagtgcgcacggccattgattttctccgcaaacagaaaaaactgaaagtgatggatgatgaaacgatcgagtttttaagccgaggaaaggaagatcactacaaggacacagaccttcacgaagcgcttgatgacctgccgcatcaatataaaaccattatcattctgcgtttctttgaagacctgaaattagaagaaatcgcggacatcacgggggaaaacatcaacaccgtcaaaacacgcctttacagggggctgaagctcatgcgcattcagctgacgaaggaggatctttcttaatggaaaagagattagaacaattaagagaagagtataaaagtgtgcccattcctaaggaactggacagcattgtcgaaaaagcccttcagcaaaaaccgaagaaaaaacgaatcgtgatgtggccgacatccgcggcagtcgctgcggccgtcttatttaccgccgttgtcaatatcaacccggatgccgcacaagccatgtctaaaatccccgtcatcggcaaagtcgtccaagccatcacattcacggagatgaaggaagaaaagaaccaatcaagcattgatgtgaaaacgcccgctctgtccggactttccgatcataaactcgaagacagcatcaaccggcattatatgaaagaaagcaaagagctgtatcaggaatttatgaaggcgacctcaaaaagcaaaaaaggccacctcagtatttacagcgattatgaaaccgttactgacacagcggatctgatctcaatccgccgtgatatcgaaaaaacgcaagcttcatcttatacgcaaagccgttacatcacgattgataaaaagaatgaggccgtgcttacgttaaagagtttatttaaagatgaccgttatattaaagtcatcagcgaaaatattaaagaacaaatgaaaaaacagatgaaagaagatccgaataaaatatactgggtcgaagaagatgatatgacggagccttttaaagccatccgcgccgaccagaatttttatattacagataagcacaaacttgttatttcatttgatgaatacgaagcggcacccggatatatgggcgttacagagtttacaataccgacctccgtcatctccaagctgcttgtcggagaccgctacatcagataaagaaagaaaaaaatccatgatatccgcagatcatggattttttctttcgtcccgcaacagccaagatgcataagggacccttttcatataacagacgccggactgggactgaaaagtttaagaaaatcacagcatttcatacattttttctgaaacaaaatccccttccgaatgcgtctaattaacggaacaaatggaagactgtacagaaatcagctatagctatccgcaaaacagcgagaatttccgcacacattattggaggaataccatgtcagacaagtcactgcatcaccgctatattcccggactggatggacttcgcgcctttgccgtcctcgcagttatcgcatatcatctgaattttaactgggccgacggcggtttcattggtgttgatatcttttttgttttatcggggtatttaattacatctattatattgcctgtccaaggcaatgccatcacccttgatttgcgtgatttttgggtgcgccggatcagacggcttctgccggcggcttatctgatgattatcatgacggtcatttgggtcgtattgtttaacagcgagctcctgcataccgtacgcggagatgcggtctcctcacttttttacataagcaattggtggtttatctttcatcaactttcttatttcgacagcttcggctccccttcgccattaaaaaacctttggtcgctggcgattgaagaacagttttatatcatatggcccttcctgctgcttgcgggaatgtacatatgtaaaacacgggcccggcttgcggccgcggtcatgttcctcgcgttatgttcggcagtcgtaatgagtatgatgtatgtgcccggcggagatccgagccgcgtttattacgggacggatacccggtcatttgaattgctgatcggctgcgctttagctttagtgtggccgatgaaacgattatcttccaaacggctgccgagcagcatgaaacacctgcttcacgggacggagcttgccgcttttgccgcgctgctgctttgcgtcttttacacggatgaatatgaacccttcctgtacaagggcggcatgcttttgatcagcatcaccgcagcggttcttgtcgcatgtttatgccatccgagcagctttttgggacatgtcctttcatggaagccgcttcgctggatcggaacgagatcatacggaatctacctttggcattacccggttttcgtactgagcacacccgtgcaggaaatcggaaatccggtttattggcactgcgccgtcagaatcggcgccactttcattcttgccgagctatcttaccatttcattgaacagccgatccgcactgcgggcttccggccatttttacgccgcgtgtttctgaaccgctttctggaatggaagacgtcctctgtcatcagcagaatgtcgctcggcctcattcttgccgccattctcgtatttgcgggcgggctgtcagggatagccgaagagaaaaaacagccgcaatggacgtacgcgcagaatgatcagcaagaaaccgccgcctcttcgcacaaaacggccgatcacgatcagcctgcaaaagaagaagacagcaagaaaaaacacggcggcgaaaaaacggataccgcgtcagacaaaaacaagaaagaaccagcagacaaatcagatacgaagaaaaacgacgagaaaaaggaacggtcatctcaaaaaacggctgatccaaaacaaacacagcctcagcaagacgtgctggccatcggtgactcggtgatgctggacattgcgtcatacctgcggcagtccctccctcatgtcaccatcgacggaaaggtaggaagacaagtctctcaagcactccagctcacttcggaatatgcgtcatttaatcagccgaacaaagcggtcatcatcgagttagggacgaatggctatttcacaaacagccaaattgaatcactgatcagctccttttcaaaagccgatatctatcttgtcaacacgcgtgtaccgcggcagtgggaaagcaaagtaaacgaatcattgcgccggcaggccgagtcacgcaaaaatgtgacgcttgtcgattggcacgcaaaagcattgcagcaccctgaatacttcacaccggacggcgtccatctcatacctgagggatcaaaagcgctgacatccctcatcgttcaaacaatgaaatcatgacaaaaaaagaggccccaaaaaggcctctttttcgtatatcatcaggcaagtttctgtccgcaattcgggcaaaaattcgcgccttccgttttcgttccgcagttcggacagaatttcggcttagccgctccttccgagccgtttgcctgttcggtcccctgattctgctgactttgattttgctgcggctggttctgctgattttgattcatttggttcatcatttgatttgccacattcattcccatcatcatgcccgccatgtctgaggcggcgccgcttccgctcattttgccggatgacatgccgtccgtcatggaaatctgctgatagcggttcacatcgcccaccatgccgtaagaagcgtttttcgtaatcatatcctgaacttcctgcggatagttaaagctcataatattgaagcccgtaatcgacatgccgtctccgatcagctgcatatcaagatcttcttgaatcccttttccgatttcaaatgaattcgactgcagattgaacatgtcttttccttctctggtgatccatttcatcaaaagctgatcgagaatagacgtaatccggattttaatgtcctctactaaatagctgtctctgacacccgcaatcttatcaatcaatccgatgtagtcaatgaccttgaagttaaatgtgccgtttgcgcggatcggcataccgcccggcatacctgccgccggaatgttgatggcgttttttgtgccccacttcacggtgaactccttcgtattcacaaacagcacttccgcccgcatgccgctgttaaagccaaacttaaacccttttagtgtcgatagaaacggaatgatttctgattcgatatcataatcgccgtcatcacggaaaatcccttcaatcttcccgttgtataaaaagatggcatcctgtcccggccggatgatcagacggctgccttttttaatttcacggttgttccatttatagaaaaccatgtcgtctctgaattcttcccattccaccacatttgctaactgatttctgaaaaaacccatgtatgctcaaatcctttacatataatttaaaaacttcccttgcttccgctgtaactcgtgccgcccctcgtgactccgccgtcattgtcattatctttatctggctttttttctcttgtaatgtcggttcggatatatgtgtcgtgctggctcagcacttcagacgtatcgtgatccatatacgtgctgccggtgacggtgaccttgccgccggaattgtacaccatcacggtgacggcgattccggccgctgctgcagcgataatcagctgaaaccaccatgtgagcagcagattgtcagacctgtcgtccgggcttttccccatatctttataagccatcttgatgtaagtctgaaacgccttttcataatggcctgcggaaatatctgacgagatcgtatttctgatcgtattcagccggctgctgttcaaatacgtctccgcctttttatatccggagagaaatacttcccgatccttcatatcaatagtcaatatcgccgtgcttccgctaaaatgactgtcataaaaatcaccggcatactgttcgatctccttaccgcccgttccgtttgcggtaagaatgataaaatcggtatggcgcttttctcccagcttcccggccaattcctcaagtttcttcgtttcatccttcgttaataaatgagcattgtcataaacatattgcttctgttccgcggcagacgccgatgtatgtaaagaaaaagacagcatcagaaaaaggacgaagcagaagagacacgctttttttatcgatactttcatcaaaaaccgcctcctatcataagtgagacgagtcttaatgctaaaaacgcaccggcggttatgccgccgaaccacgcggccacttttccggcactgatcggcggtttgccgacaaccttgcccgtctgcccgttcatcgcaaaaatgtgctcagcccgctcatagtcgtagctgaccatccagaccggaagcagtacgtaaaagctgctgattttatcggtctgaatctgctcatccgtaatgtcagccgtcgtatacccggagaaggtggatctgatataagaatcaatataatggctgattttatccttcgcccgcggaaagagatcgtcatcggtataattgtacttttccgctatatatcccgctaaataggccgtattaaactccttcagctcactgtatgagtaaggctccaatttgtccattaattcatcattcattttttctgaagcgtcgaccggaattttgagataatcaagattgatatcgcggtacgcgttgtaatactcggtctccgtcacccggtattctccatcttcatagtgatgcactctcgtacaaacggcattgacctgaaccttgctgtttaagtcaaacatccaaaacggcacgtacatgccggttatgctcttcacccgatcggcagtcataaatcctttcggtgtcagacggccgtttcggcaccactttttaaaagcgctcatggcttcttctttactgatcgtaaaaggaatcaccatcgaaggcgcgagatttcccgataatcggtcggcgagaacggcggctcctccgcaaaacccgcacgtcgtggccgtcgtttccgcctcagtcattaataccgcgccgcagttctcacagcggtactcgttcgcctcattttcggaaaatctcgttgttatatactcttttggcaggctttcaatctgatcctgccgcccgcagctgtgacatgtcagcatgccggatgaactgtcaaagaccatatcatcgccgcagttcgggcatttataagaaatgatcattctgtttctctcactttctctttatatcggacaaagctgcagcccgctgtctattgatctttactgaaaagcattttctgcttaagcgccgccaactcatcgtcgacactgctttgattgctgtcatatttagccgtcagctcgtcaatatcgtctttcggagacgcgttgagctcagccatcgcattggcgtgatcaagcgcccggttgaccttgtcttccattctgccgaaagctgtcagcgattggcccgcatttgacacagaggaccccaatttgttcattctctcctgcgtttttgccacagaccacttcgctttgatggcatttcttcgcgactcaagctctccgatatcagcgacaagcttgtcatgcattttgcgcatttgagacgcgttggaagaagcgagctgataagccgtttgcagctcagtcagtcttgattcaacagccgttttcctttccaaaaatgtccgcgcatcggcttcattgccggcctgcaacgctttcatcgcgtaactttccatcttttcggcatcagcctggcattctgttaatgctcttttcgcccgctgttcctcagccatgacagaagccgtctccgctttcacttttcctaaatcactgttcagattccgtaaatattgatcaaccattttttcagggttttcagctttatccagcagcgcattgatattgcttgacataatgtctttaaatcttcctaaaatactcatttttcattttcctcccaaaattaaatagtaacaagttcacagttatatatactgtttttttcgaaaaaggtttcattttctcttgaatttatgtatttttatatgaaaatagtctcattcagcccatttgtgccggcggaaattcttcacgagcagatacagtgagaacaaagaataaacaaacagcccgatcatcaacccgctcactaacggataatgcttcgccgcatacacaaagaaatccagctgcgaaatctgttccggacttgtaatcgtatccgtcccattcaaaagctttgagaatttagccgtatcattccaatcaaacgagtcagaaacaagctcactcccctgataccaattgacagcggcgagacaaagaaaacaaaaaacagaaaacgcgcattgcacaataagaaaaacatgtttcataaaaaaattcctccgcggttcaatatcacaggccgtcacactgtacatgacggcagcagcagaaacttggttttactcagaactgataaaaacattattgtatgtacttcacagcggttcaatttactggatgcctttctaaagtataccgtatatcgaaaagggtttcagacctaaataaagaggatgcttcccgaagtccgatgactttcaagaaacatcctccatactttacagtgatacttcaacctcttttaagctcggcaaagcatcaatcgcaccgattttggtgcacacgagcgcccccgctttattggcaaatgagacaatatcacgcagcttcgcaaaatcttcggctgccgtctgaacctcatccgtgcgcgccagctgatacagcgccgcgccgacaaacgcatcgcccgctcccgttgagtctattgatgtcaccggaatgctcggaatgatgtcaatatccttcccatttgaaagaagggtcccgcttttccctagtgtcaccgccacaataccggccccaagctcatgaagaaccgcaacgccttctttatgatccttcgcaccgctgatgatctcaagctcttcgtcactgactttcacaaaatcacttacggcaatggctttttttgcggtgtttataaactctgaaactcttcctttccataaatcctcacggtagttaggatcgaaggaaataaactgtccattgtctttcgcaatcgacatcagccgtaaataggccgagcaaaacggatcagataacaatgccgtcgctgatccgaaatgaaggattttcgcatcgtttaccttttccagatcaatatcatcaagcgtaaacaaagcgtccgctcctctgttaaacacaaagtcgcgctccccgttttgttttaatgaaacaaacgcaagcgttgtaggcgctttctcatccatgacgagcatagacgtatcgacatgtacggcgtccaatgtctgcttcagaaagtacccgaacggatctttgcctgttttcccgctgaaagccgcgtctccgcccagcttagcaatggctgccgacacattcgccggtgcgccgccggcactttttaagaaattgcgcccttccgtcaaatcaacatccacatcggtacaaaagaaatcaattaacaattctccaatacaaataacagattgccttcccacattatcacactcatttatcaattctcgattatagtttcagtatagtgctttctgtcataaatacaaccgtttacatagaatattttaaattttacgtatacttatctggcagccctttgctccagatcagacatcatctgctgatattttttttcagttaaaggataaaaagaaataagaataatagacagcagaatgaacaatcccggaatgagcgcattcatatttttaatcgcattcaatgacgaggcggtctgatcggtattcgcggcatatccggcgattccgagataaacggccgaaaatgaccccgctaacgcaactccgagcttattgatgaaactcatgctcgaaatcaccacgccatcagcccggactccggttttccattccgcataatcgacacaatcggcaaccattccccaagcaagcgtatttaaaggcgtcgtgaaaaatcccgaaacgaaaagccaaaagaaaataaggggaatcgaggaatacgatgtaaactgaaggcccgcataagaaatcagcgataacgccgccgtgatgatcatgacctgcttccggccccgcttcttagaaaagaaaggaataaacagattgctgatcagcgctgcgccgaaaaacagcacggttcctaaaaacacaaattccttatggctgacgttatacgtaaaatagtacaccatcgtgctgagcttaatgttaaacccgatcgcaaaagctaaaaatgaagaaaccaaaatgagcaaaggcttgtttcggaacaaaacagacaacgtctttttcattccttgtttttttcttttttcaggctgaatccgttcccgcacggtaaagaagctgaacagattcaatgcgatgctcaccgccgcatagataagcgccgtcatctggaatccgaacgcctgatctttcccgccgatggcgtccgcaagcggtgtcgcacaggaaatcgataacagaattccgatataaaccaaaatcatccgggtcgtcgtcagaaccgtccgttcctccacagaattcgtcatccgacccgttaagctgttgaccggaatcgtctgcatgctgaaggacatcccaagcagaatataagtgatgtacgcataaaccatgttccctgtctcgccgaaatgaggagtcgtaaagcataagaacgtaaataacgcaaaaggaaacgccacccacaaaagatacggccttgcctttccccatcttgtattcgtcttgtctagaatcacgcccataatcgggtcaaaaatagcgtccagcacccttacgataagaaacaaagctgcgatgaccgcaggcttaatgccgccgacatctgtatagtagaataataagtatgcgtttacaaactgaaagataatattgtacgacatatcgccgaatccgtagccgatccgttccatccaggacaggccgcgatgtttcgtctttactgccgatgctttttctgtttcaatcatcatttcccaccccaagaatccgttttcatttttgataagcaagagggagaatgcaaagatcctccccgttcactcagcgatttggatacaccatcacttttaggcattcatttttgtattgaaaggcgcgttccatcgcctcttgcgtcttctccagcggatattggtccgttacaagatgcttcgtgtccactatgccggaagcgagaaattcaattcccttcggatacgtattcgcataacggaagattccgtatatatcaatctcgttatctgcaataaacggcacattgagcggaatctcgttctgagaaggcaaaccgacaatcgccagttttccgccccggcgcacggaagccagtgcggattgcaatgctgccggattccccgctgtttcccaggcagcatcaacgcctctgccattcgtgatcgttttgatttcttcaccggcatcctgttcccggacattgatgacatgcgtcgcgcccatttttttcgcggcatctaaccgcagcggctccaagtcggtcacaatgattgtgcctgccccgtatgctttcgctgccgcaacggccatcagccccacaggacccatgcccatgatcgcaaccgtggaaccgggctgaagcttcgttctcgcggccgcatgaatgccgacagaaaacggttcgatcaaagccgcatcttcataggaaagtgaatccggaatcgaaaaaacaaagtcctggcgcattttgatatattggacaaacgcgccgtcaaccggcggtgtcgccaaaaactgtacatccgggcaaagattataacgcccttctttgcacgcttcacagcgcccgcatgtgacaccgggttcgacggcgacccggtctcctattttaaattgatcgacagacgatccgacggcggcaatttctcccgcgcattcatgaccgaggataaatggtttttccactacataattgccgattctgccatttgtatagtaatgcagatcagatccgcaaattccgacagccatcaccttaatcaacacttcatcatgattgatgtcaggcacgggcaatgtttcgattttgatttctctcgtgctgtgcataaccgccgctttcatgttttgaggcactgtgtgagtcatttggcaaaatcctttctctgctttgaaatgtaagtgcatacatttttgttttctctgttactgcccctattttatctgcttttccatacgttcaacagcctttcctgctgtataaaaggacagccgcactgtactttttattttttcatatacaaaaaacactgaattgataaaatagtactaataggaggtgcaggctaatggctgaactagaaaaccggacacaatttgcagaactgctggcacctgccgtcaaatcgctgaaacttcatcctgattataaagtcagaaggaaaaagaacgaaaaaacaggacagtcttatatcgatcaaatcgcactccgattaggcgtttcctctaacacgatcaaaagctggatcggacagatgggcgcaaactacattcccggacgaattgacgacggaaagctgttcggcatgatctggatcattatcgaaaagactgacatggatactgaatggctgaccggccttctggaaaccaccaccattcccgtcatcaaacccgcattgcccgtttggacggcgtcttgtctaaaaaaagcaaaaatacaccggaaagacggatcattcggagcgccgagtgatgaagatgttgaaaaagcagtaaagcggctgtttcatgacagacccggccatgaaacgaatgcgcttacagaacagcccgtcacgcataacttaccgtcacgccggaccgggaactttatcggacgcggctttgatatagaggcgatccggcaatggatgctgtctccgtcaccggtctgtttaatcacaggctgggccggcatgggaaaaaccacaatcgctcttgaagcagcctacctttgtgccggcggttcaccagattggcctgcattcaacagcatcatttggatcagcgctgactggaaaggattgagcttcagcgattttttaaacacgatcgcctatcagctcggacgcgcagaacaaatagacaaatccatcaacgaaaaacggttcgtcgtccgtaatgcattagccgctcattcaaacgaaaaacccgtgctgctgatcgttgacagcatcgatacagcggaacgtgacattcacgaatttatcatcggtcttccggaaggcgtaaaagttctccttacggcacgggaaaacgtaaaacagacataccgggacggcctcggggaactggcggccatccagctgagcggccttgaacaaacggatgcccttgaatttttccatcaagaagtgcaccgctgtctgcaaacatgcaacctcccgcaaaaacgggaaaagctggagcagctgcggcggctatcgcctgaccttaagaatgaattcgtctcggcagccgccggcaacccgaaggccatggcactgagcattgcatacatgtcagacgacgacatccccgctccccagctcattcaagaacttaaacaagcgggctactcattattggaattgtttgaggttctctttggccgcacatgggacagatgtcatgaagacacacggaaactatggcagacgctttgctttttcgctaagccccctgatgaaaaaagcttggctcaagcggccggattagacgtccggcggtttcattacgcgattgagcaaatgcggtcatatgctttaatacagccggaacgaagcgaaggaagaattcaatacgcagcccatcaaaccgttgtcgcttacggagaacagcacttatccgaaaatcacgaatttgaaaaaggagcccgcagccgctgggcgcattattatatcgattatgcggaaacccatataaagcgggaacagcccaattctgtctattggagctatctgctgggacggaatttagagcaaatgaaaaaggaatggccgaacatcctaaaggtcatcgaatggtcgagtgaaaccggacaacatgacatcctgatcaaactcatcatccgcatcagccattttctaagcagaatcaacctgcccctgcgaatcgaatacggattaaaagccgccgatgccgcccgtcaatcaggcgaacacacgcgggaagcctacttcaggatcgacacggcaggctgggcgctgatggaagttaatgatgcggacgaagccctcaggcaaatagaagccggcctgaagatactcgaacaatcaggcgcgccggatcacgacgacttgaaagtatggggaatcgccctgcaatcgaggctgctgttaaaaaccggagaaccggacaaagcggcagcaatgctggacggcatcaaagatcagcccgtctcccccattatccggcacagggttcttctggtccgcggcgacctgagtttcgcccgctctcactacgaagaagccatcacattatacgaagcggcaaacacaaccagcgccgcatacggcggcgaaaaaacgatagaagcctatttcaacctgggcatggcttacgtcaagtgtgatcaactcgaaaaagcggaaaaagcctttgaacaaatgctctatgacaaacacaacgccaatcaagttgagttgatctattactattacggaatggcacagctgttgtatcgtaaaggagaaaatacgaaagcgatggaatcgaatcagaaggccattcgtctgattgattcgtgggagcctgggattgggattcggggtgaggtggagcagctgagaatggtgcttgaaggaaatgaggaaatcacattgtagttaggaaagtgtgaggtcaatcttagacaaacgatctcataccttctcttttttataaacaaaaaaggtcttatctagttgagtaactgataagacctttctgatagaacgctatgagcatttcaagtgaactcaacagtcaatcccttggtatacccaagggagattacatcatgccgcccataattaccacggttttcgctcgctttcgcaccctttcaatcggtgttatttttttagtgtgatcatgaatggaaaagaaacaaaaaccgcattgtttcagaccctgacgcaactttcgttatttttgtgttattttttaaaaaataacaggtttgtttgcatcgcgaacacacgttctttataatcgtctccaaggagatgaaacacaatgaccgattttgagcgtaaagtgtatcggattatttttaatatgacccgcttcgggaaaaatccctccatggaacaattgaaaaggaaaaccgggaaagatgagcagacgatccgtgctgctgtgaagaatttgatgaggcagcgcattttgaagtgggataagcataaaaacaggtggaattttaaataaaaaagaaagcagggtatctccctgctttctttagcgaatatgtagcgaatagtaataatagcgtatgtgttttctaatgtgtattcataatacatccaatatatatttcctgtcaagcaaaaaagcaattattttacaacttgtgcttgatcttctgattcagttattttagctaaccctaattcagaacataagatttgatttttggaactgccctttaatttacctttgcttaacacttttgtctcttcaacaataaagctcttttgtttaagttcctctaaaatctcactaataatctctgctggggtcgataatgtatttattagatatcttttgaaccaactcaagcctaagaacagatctccttgtgtaccaaagctatcgtgccatttctttatctcaacaagaatttgattcataagtttatctcggtcatactgcttttcttcaataccaagtaaactcgccaaatcttcagcatgatgagcataattcttaaattcaatatgtttaggagcgtttttagctgaataataaagctcaactctttttcccttgtacattaatctactcataataggaatcatgtcactatcagctgttacaaaaacataacaactaatcgaaggatccttgtatgtattttcaatagcatcaatacaaagttcaatatctgatgcatttttacgatgatccccatcttttccatttgaataaacatgccttatttgaacacgctttttttgaagacttgtcatattacttcttaatttgttaaaatccgcatacactctaaatgaacgtacattgtcttgaccgtatcgttcccataaccttgaaaataaatttttatcttcagattgataatctggatcatggctataattattcattagagaccagtaaacgttatcataatcaacaaaaatagctacattatcaagttttctttcagaattaaacgttcgattcgaatcgttcaccacagatgtcatgatttggaatgctgatttaagctgttcgtcaactgctggttgtggtaatggctgggcaaccgtccctgttcttttttcttttaattcgtccaattaaattccctcatttcattagaaataacacacataaaagaatttaccatatattcaccaataaaagtatattttttgacttcatactagcttaaaagttatgtatttctcccatttacaacaaaaaaagcctcgtccattggacgaggctatatcacttcaataatttttcaagtttcgcttttgttttcggcccataaatgccatcagcaggcagcccgtacatagactggaaccgtttgactgcatttgctgttttcgcgccatatgagccgtcaattccgaagttctttgcgctcttatcggggtaataatgaagagccgccagcgcggtttgaatctgttttacggcctcccctcgggtcaatgggcttgtcactttaaaaacacccgcaggcagactgaattttgatttttgagtggttttaggctttgaggcttttaccttcttttggccgccgcttttcagctcgttatcgcttttgatatatgagacattcacatatccgtggaatgtctggcctttagaattggtgtattcaacatatccccatccgttgacagttgatccaagctgatattttacaaccgtgccattcggcaggttaagcaccatggaagaagaggcgctccgttgtgtacgtaaaacaaggccatcgcttgaaaccaccgtgtttttgatgaatcttcctgtgtctgtatgggtaacatccggatttgatacaggcgccgttacaaccacaccatccattcgcttttcaacacggctcttaaaatcggcaaacccttgagagttgcttacccacggcgccgggcaaattttatgtgtaatgtcataatgtcgaacaatatcattggttggatcaagtttgtacattttgcacagctcggcacaaacttgtcctgcacgggcaatcgtatccggatggaaagtgccgttcttttcaatgcaaagctccacgccgatagataagaaatttgcattcggtttcagcgccgcgacaccccggtaaggctgcccgttgacgaattgctgaatgtcattcgcatgataggcaacctcattcaacggaatgatacaaatagcctctgtacgatcgacaaagatatgtgcagatgcaaacgtctgttttttctcagatagatttctgttctgtgcggggagcgtttggccaaaatatctataatgattggcagcaggcgcgccggggttggccgtgtaatgcaccacaagtttcttcacgccgttgtttttgattcccggccgcgtccatttattaatatcaatatattggtttctgtatgctgacataaaatctctcctattctgtttttggattcaaaaaagcagccggattaaccagccgcctgatcatctttttcttttgtctgatcgttgtcgctttcaattacgtgaagccggtcagtgatgacggccggaattttaacgccgatctgcgccaaattctccgtgatggacaggccctcatttgcgatataaaaaagaacggttccaaaggtcaggacgccgttcaaatttgttatcgtatcaataatgttggcgacgatgaccaccataaaactgagcatcttccgcacatacccaaaccacgcgctgcggctccggagctgcttcattttccacgctttgataatgccggtgatgacatccaagatgctgaggattagaagcaagtcaaggtacttcacctccccgaaaagatatgttcttgcgatctgtaagctttcaaaattcatccacacatgtattccctccattttgatcacctccttcgaggcaaaataaaaacacctattcagttacaggtgctggttcactattattttctttcgccgctactgccgcatttaattgcttttcgagttcctcgcgtttattatctgtaaacgtgtatagcgctttatattcggccagctcattgttcttcagattcaattcctgctgtagggaagcagctttatatgctgctatttgtaactggtcctgaagttgctcttttgtcatttcttgcatgcctttcactccttactcttgatcgggatacgcattaccgcgttcgctttctgtaatttcatcatattccgcttgtgtgatgcggcctttctcaacggcttttctcatttcaacggtcaaaacagttccgtttttccagcaatcctcaaaaaacccgaaaagagcacttcggttctccaatgggctccccccgtttccttttattgattcattaagagattgcaaacccgctgaaggtcaagaacttgttcctgcaacttttcctctgtagtcttttccttctctctatcttttgcttcaatatttaataccacgggctcaagcttcatctttgccatcctccttattttgaacatagattgttataagcccttctcggttgccttgtggatcaacgacaatttgaactggaatcataataagctttttgctcccactgtacccttgataataaccgtcaggctctacataagtttttgtgagcaaataacttatttcatcagcctttatatcatgaaggacatataattgatacgctacttttgttgtatcgtccggctgcagatcgaacgaaacagcctccatgggatatgtcttgtctcctttttttatagagccggcagttatttcaattcccgcgccggtttcttctatttcgatgccgtccgcataataaagactcatgttaaaatcccttttttcaaccataaaaattactcccttattgtgattcgtaaaaaataacaatttgaacctttattgtttttcccgcaactccggcagtagtcccggtccctctcactccaatatcaacagaactggcgcttatattttctaatcctaccgtaaccgcattagaatatgcgccaatcgctgtacctaccgccgcaaaaacgttctcaggcgcataatcaaaactatcaacaaaaggaatgcgattgtagcgcgcgtacgcagttgcccctccgtcaggcggcagtttaatgtcccaagtaaagcagtaaaccatcaaaccgtattgtaggcctccatgctcgtcttctaattctgtagaaacattgccacccatcaatttgaattcgcaattttttgcattccctgctacaactttggttcccaatggcagcgttaaatctgatgcatcaacaatcgttttttggcctgatttcagtcgaatgaccccggggacatcaatatctaaattattcggtttaaagcgataaatagtagctgatccttcaaaaagggcctgataacggttatatgtgaacggctctcctatatttttaggattggtagtagcagtaagaagaaaagcgtcttcttcaacagctgcctgtctttccattttcatattaaaatggcttataacttgtccaacatctcctatttctgaatacattgaaatagttggaaccgtttcatatgcggtttgcttgcctgcgccacggagctctattttgccatcaccaattgaaactgttctgtagatttcattataggaatcaccaggatcaaaaaactttccttgttcctgcgttattttcccagaactaacaatcaatttgttgtaaacataatgagagtctctggtgtactggtaaatcttatcgccttcgatatagtattcggcatcttctgattgtgtcagcgcctcgaaacgggccccttttatggtcaccccctcaatcgtgataccttttaacgtcccgacatttattttgtccgctgaaaggtctttgatcttggcgtttgttattgaaccgtcaatgatgtgtaccgaatcaattattgcttcttttagatgcgcctttgcgatagccgcattttgaatagccgctgtcccgatagccgcttcagctactttcgcacttgttatggctgcattttttatatgagctgtttctattaccgccttttggaggtggtcgccatcaataacaccatcaaccagctgagtatcaaacgggctataaccataatcagaaatgacatcgcctttgcgcacctgtaccttacgaataacaaagctacagggctcagtgtttccgtttcgattatatccgccgattccaattgtgtaatcagagccggtttccggagcagtaaatttgatattaacccttataaattggtcagacggaaaagcagaaatatctttctgttcatcgctgctaatctgtatgaaagtgctgccttttttcaaatgaatataacttatgtcggtggtattattccgttttatttcaaatgacagtgtatattgttgatctttgatcaatgccattctttgaatattaacaggcgatgacctgttcccgcatattccgaaagctattctagttgttccattgatgatctgagaaacagtcatttcattaaattctttttcctcaacactgtggctggtgtccgtataatcatagaaccatttagattttaaaagagagccaggtaagatattagcatcatcaaagtttcttgaaagtttatcagcatcaacggccagctgggccagtttttcctttgtgatcgctccgaaaacaatgtcatcagtcaaaatgcgctgagtggtcgcggaaaactgatccgtgaattcgctcgctgtgcctcgtgtgttgattgagcgcaagcgataataccaaacttcatttactcccgtaaaatgctcatatccgcctgttttgcctctgaaaatacgattctcttttaatggagtgaatccatttacttgtgaagcatatacctcataggctgcaatataactggacggatcataatcccatgtcagggccacattctgaaacattgccttgatcactacattcgacggaactggcggggctttgtcagggaaacttccatccgtaacctccccggcatccggtttgctttcccaagtaccgcggtttttttctatcacgctttcaatttgatcaatccggccgtctttttgtaatgctgataaaaattggccgatctcaacaacgcaagtattttcagggtcggtaatatcgtattccattgaaataatgcgctgcgatgtctcgattgggatagcgaagtttcgatcaattgcgatcgttgtatctcccaattccacatgttcgtgttcgtgtcccggcacgctctcaagcagctgcacagacaactcataattgatttctgtcttacatgcagtcgttatcaaatgattatatgtggcctttaaaagctcttccggctccgttatgtcttcatcattgtattggccttccctatggatcaactttccatctttaaggcgccccaatcgttctaataaatccggatcgccaacccattcctggcctaaaggcttatcgaccgggtcgccttttgattttttccattctacttcagagaaatcaataaaacgagaatagccgcccgtttcctctccttcctcatccgtagatgctatggatgccccgtaaccccaaagggctgtcaccgggtaactgataacagtccgccggatattcgttgtatccttatcactctcaaagcgcttcccgctgtctttaccgcgacggggaagtatttttatgattcgtttgacgaccttatttccatcaaattctatagtgtcctgaagctctccgccccatatattgatcacgtcagcaatacaatccaacgctgtttttttatagaaggtagtcgaattcactccaagctccgccgttacttccgccacccatcttgaccgagaaaggacgttgtccagtacaaactgagcagttttgttagttgggcggaaatcttttacaaatgtttcggcaagctccatcatggcagcctcacaggtaacctgggtgttaacctctccttcttcgtctgcatcatccagttccttgatgacaaacagacgcattacaccgtccttatccttgaataccacttgattctcttcgaataggaagcgcgcatcagggtgggaggcatcggctacaaaagaaaaagaagagcccttgttgagctcttctttgtatttcgcatcccagaacgtacaggtttctcgtccgtggctggacagcactgtcaataatttatcatctggtgaaagtatataaatgtcagccatgaccggacctccttacaaatatgcctcattaaatttgatgctgctcttatgactgaacttgattttaactggcgtcctaggcggcagcagaaaccaatctgattgaatttgaagtgctgtcatgattaaattaccgctgcaagtgacttttctttttgcagaatcaattacaagtgtgtcaccagcgatgaaatcgtacagcagcttgatcgttttcgatacagacccatcaccattaagaagagccacttcatatgaagtggctttctcttcaaagacgcattcgattgtcgggtctacggccgcatagcccggattagtgatagtctgaatacctgaattaaattcaaaatccttcgccgggccgtatttttttggatcaggacagataaaagtcaatgttgcagtctgaaagcctccctgttcttcgccttctgaaatgctttcaaagacagcattatagactctgtcaggctcatcgtgaaaaattaacggtttaggttcttcggtgtgcagaataaaagtcagttcctcctgctttttcttcagctcttcttcactgctgaaagcaaaaagaacctcaacggttatgactcttacaggaattcttgtgttccgcaggaaaccgccggggcgattcccgatagtggctgtattcacttctcttccggtcactccccggccgcccgtggacttcacataaaagaagggtgatatatcaatgccgtcaaacgtgattttccattgattaggcagcagttcctgataattgatcaattaaatctcgtcctccttgcgttcgaccttttctgagcgtctgtgaccggtttttctacgccttgaccgaccttcttgctgtccatctcaacaacaatcatcctgtcaggcaattcaaggttccggatgtccgcgctcaattcttttctaaccgtgccgagttcgctgctggaaatggatgtgtcatatgcaaaattcagatcctcctgctgaatagtcatggcatcactgacgacgcccatagctttctgaacagtgccgataccattctgaatccccacagcgataccggcaggaaccatgaccccgacctgatcccgcatcaatctggatggggaatggattttcaatttcttcttaatcgttttttcaattgtcgaggcgatggaatttgcttctttcgccagctcgcccttcatattcttcattccagaaataatgccggccattgtatttgaaccgatggcttttccgcttttcttgagagaaccaagctgttttacatccactgtaagctccccaattttgcggagatagtcatttttcaaaagtgccagttctttatttgcggcagaccgtaattcatttattttcttggtcgtcgcgttcttcaacccggttaattcttgagcagcctggtcactggccagcttgtgcttttctttccacagactgacatactcatttagctctgaatctgtcatgcgggctattgcattaatctgatcagctgacccgacacccatttctttcaattcgtctgtgaatgcctttggtgcccggcttgctatttttgtaatgtcagtgttgaacgttttgatcttgtccagctgctttttaagatttgaagtcagcttggagccgttcacattttgacttgagacatcgtcaaatagaccgatggcgttataaatcgcgtcagttcggtcttgcagctcctttttataggcatcgttggccgccttaatatcggcagtcagtttatcattcacttttttgaattttgagagataagtattgtttgcagaaagaatgcccttgttaagtttgtcagccgctttcttttcggcttccttctgctttctggccttatcagtcatagctttttgagtctgatagatttcccgttgaacctttatttgctggtcagaattcagcttgttcttcttcttgattttctcaagcgttttgatataggtattcccgctgatttttcctgtatcgtattttgcctcagctttcttaatctgatctgatactttcttggtatacgccagtttcgccttcgcttccttgcgctgctgctctttcagtagcttcttctgtttatcagaggcgcttttggatgcctgatatatctcgcgctggatttttcggttttgctcactggtcagcttgttttgcttctgaatcttctgcaatgttttgatatacgtatcggcgcccattttcttggtgtcatacttcacttcagcgttcttaattttgttggatacctttacctcagccgccttctgagccgctttcgctgcttttgccgcagccgcttttacttttccctgtgatttatcaatacctgccgccataccggtgccgacgtgataaccgacctggtcacgcattacccttgacggtgaatggattcccagaagctttttcatgccgttaggaattgcgtttgccattgatttaactttgctcgctaatgcacccgccatgccgctgataccatttattaagccttgtatgatgttgcggccaatggacttgaggttgatgcctctaaaaaatttcatgacactattccaaatgctgacgatacgttcttttgttgcttggatacggtttacgatttgcgctttcatgtaactaaatgctgtagaagccgcgcctttaatgccgttccaaatggacatcactttgcttttcactgtattccagaggcttattactctgtctctcgtcgctacaattctattgacgatttgcgcccgcatgtagttgaaggctgttacagctgcactttttaaagcattccagacagatgtcactttgctttttatcgcgttccacaaactgaccattttgtctctggttgcaataatccgattcacaatttgtgcgcgcatataggtgaaagcagtcactgcagcacttttcagagcattccatatggacgagactttactcttaattgcattccagatgctgatcattttatctctcgtcgcaatgatcctgttaacgatctgggcccgcatatacgtaaaggctgtgacagccgccgatttgagacctgaccaaattgatgtaacggtgttcttaatgccgttccatattgaagtcgcagtctttttaatcccattccagacagaagaggcaaacgattttatagcattccaaactgttgtgaaaatggttttgtacagattgaattcccacttaaaaaaagcagatagcccgttccaaatggttttagcagccgaaacaattccattccaaacagtggagaagaacgacgttattgcgttccatgttgatgttgccgctgttttaatgccttcccatacagattggagccactgagatatgacaccccaaacttgaagggtgtactgcttgaccttatcccaattggcaataatgagaacaactaaggctataaccgccgccgtaatccacccgataggccccattgcgatgacccatgatgctgccatgcgcgccgcatttgccgctgcttgagccgccagaatgaccaagcgtttaccaaataagatcatttgcttaattcctgccgccaacattgacacaaatgaactgatttttgccgcagtccacgccgctgccatacgtgttgcttgggctgctgattttgctgctaaaacagttattctggcaatgaaaagtcccatctgcttaatgccgtttttcagcattgttataaaagaaccgattttcatcgcagtccatgatgctgccattttcacagcattagctgttgcttttgctgccataacggtatatctcgcaatgaattgccctatagtaactatcgctgattttaattgggtgatcaatccggccattctaattccggatgcggcagaactgaaactccgaatatatcgagcagcagtcataaagtctttaagcccatttgttacagcactgactgctactatcgccggaacaatagctcttaaagcaccgattaatgaaatacccgccgcaatgaacttcccgattgccgggtttgcttccatcgccgcattagtaaatttcaaaaacccgtttacattctccaaaatcgttttgcctagtggagccatgccaacaagcaagttgatgatagttttcgcgatctgccccaatgtgctccatactgtagggccgttggttttaatatagtcaatgaacgattgaaattcttttgttttcgtaacgctgccagcccactcattgaaccgcttggtcaggtctacgagggatgtcatcatgtcttgagacataggagcgaatccagtaaacagctttgtcaggccgcccgaaaagtttctgataatctgcaacaattttgggccgttggtttttgtatactccacgaaagcctggaatttctttgaggagcctaagttcgctgaccatttcacccatgattgcgtcattccttcgatagactttgtcatgctctttccggtcggtccgaatgctacgatgagattgaaaactgtccgcaagacattcccggcagatcggccgaatgaagcaaacgccttcggagcttctttgttcagataggaaatgaatctctgcatgtccggagccttgaaagccttgtccatgctttttgccagtcccacgccctctttcgccagcccgtcaaacattggaatcagtgagttaagcgcgagtttgaacgtattaagagacataccgaatgtttttaagatcggcttttgaaccatcgtaccgatgtcccgccagttgtctttaaagtcttcgaggttctttaatgcctctctctcttcttttccaagagatttttgcagattattgatctgtttcatgattttagcgcgctcttttgcgcttgttgcattgtccagcttctcctgtagcttggaaaggtcttcggatgctttgaatacaccgcttatcgaagtaatagcaagggcgccgaatgccgccgcgcctgttcccgctgttgcaaatgcactggttaaccccattactccgccggctgccactccgagcatagggcccaatgagccgattgctccgacaatacttgcaagggctggcgagattgcaggaagtagggacgttaatgccccggcaattgaatgaccgatgaccgttgaaactgagtttgtgatcttggcaagcctgttcattgacgtttcaaaccgatcaattcgagcttctatactaatccatactcttctcggcaaggacgccagagcagcgcgtgccgttgccacagagcgcataagcgcagccgtgtttccgtttatgaccgtggtaattctgtttggcagtgaagccaaagctgaacggacagccgaaaccccgcgcatgataggcgacgtggccgcattaaaagtggtagttacgttatgagatactgatgctatggctgaccgcgcaacagcgacagcacgccctaaaggagtgggatttccgtctatcgtcgttgtgattctgttcgccaccgccgatagccctgctttagcgcgtgccaatgcggaagataacggccgcacattccccattaattgcgtggtgacagtttggggaatctgtcttaatctttgcttcgcccaattgatggcccgagttaaagggtctgaatccgcatctaaatcaactcgcgtgcgttgatgtcgatgaacaaagttatctatttgttgcgccgcctgccgtactcttgcctgaaagctggcaatctcggcgtcaacctcgactgtgtgatgatcagccatccggcgcattatatcgttgacacgatccatactgcgattaaattttcttgtctgtgcttcaactattgctgtcagtctttcgatcattccctcaccccattccttgtccgaattttgcaaagtggttgcggattgcatcattaaaccgctgaacccctttggctcgtttgccgagctcgtttacatctgacttgcgccatttgtcgttatcgccagtgatattgcgctccaattggcgtctggccttcttcgcatcaaacattttcgtttctttggggcgcttctcattcatggcgtaacgatgaaacatggcgtttcttgccataagctccaattcatctatttctcgcaacttggctcctttgagcagaagcttgtactcgttaggagtccatgacatgattaaatccacatcataaaccccgagccaatgtgcggagttcgtaattatttggtcgtagtcgatcccgttctctctttgtatgcctctttcatcatcttcaagacttccttgccgttctcttcgtcctccaaccgtttcgcttccatttccggtgtttcgttcggagctggtttcttccctttgttcatcttctccatcatcttccaacgctgacggattacgcctttgaaaaaacccgctgaatccagtgttgtgaatgcttcattgatcatcttgtcaattgcgtcgcctgtctcgtcttcatcaatgattttcatgattgcttcttcaatagcctcagttgatggcttttctttcttcaagtaagcgagtgcacaatcccaaaaagcagaaagataggaagcctcttcgttgagcagactcatgtaaatattcattgtgccgcctttgcccttttcgtccgcagtggaatatttttcgtttgccaatctgtcaaaagcaaagtcgcagcgtgatttgtattctttatctccgatagttaagtaagccatttataaaacctccgattatttttgtatgttaaaaaagagcccgggaagcccggaccctatgattccttttctgttcgtatcgtaaaattggccgatcgttccgattccccagccgagttcactgccgacacattaaaaatgtaggcagtgtccggcttcaggttaggattcgacgtgtacgaattctttgagacagtcgctatttttgcataaaacctgtaaatattgtaagatgtcgcccctttcaccgcatcccatgaaaaactcacctgatttgaagtggcgcttttcgcagttatattgcggggaacgttagggcgtaaccgcttgtgtttgcgtaacaatctcagtcattgaggactcacccgcatcgttcacagcagagacgttgaccgtgagtttcgtatcggccgcaattcctgtcaaggtgtgggatgtgccagtgacagttgcgtccagctgcttgctcgctcccctgtataccttatatgaagttgccccatctaccgcatcccatttcacggtcacgctgtcagctgtagccgtgaacgatagattttggggcgcattagggcgtagttgtttttttggcattctcgccaaactgcatgaactctttggcaccggcagaagatctgatctcgtcaattaattcttgaggcagaggatcaagttcacctttacgggtcttaccgagaacaggcaatgttgttgaaacctcaataaacccatcttgcggtgcacttttttctaagttctcgatgattgcatgtccatattcagaatcatgcttatcgtttttgtttttattcaggtttactttccatacctgaactgtctcttcgttgtcataagcatcttcaatcgccgtttgacccggatcagagacagcagcatagtatgtcagttcgatgctctcagatttagggccgtacccaacaattcggccagactttgttgattcatcttttgtatcttgttctttcgtatgactgccttctgtttggaatgcgataaacagaccttcagttgaagtagcattcatcggttgaacaaagtaaacctcatcaataccattcaataaatctgccattttgttcatcctctcaattgtttattgtgaagcgcattctgagaatgccgtgacgcgtgtacccgtcaatatcggtgatcacctgcatgctgcgcaactcagaacggcataaagaaaagccctctattgttaggggcctgcttgttaacgcttgaagcatgaggctcaaaatctccatcgcttctttttttccgttgtaacctgaccagcagtgtaaaaccacattgatttcttcaccgctggatgtcttggttttaaatggggatacatcatcatcgcccattgtcacataaggcttttgctgatctttcgggactgcatcaaagacgcccgtgacgcgcccgttcagctcttcgtctgttgataacctcttaaataaagcagcctgcaacggccacagggcagatcgcatgatgacagctcctttctatcacatttgactggcaaaataccgcatgccttcgtccaccgctggattccagaacggctgtgcccgcattccccgcgtgaccacccatctattaagcttggtgtcataataaacccacggcgtttgccggccgccgccttcctctgcgtaaatccctgttccgtattccacatatacggcataatcggcaccaacagaaataacggcccgtaagccgccctcttggtagtcgatttcaattgaatttttcaagttccccccgtctattgcggcggtcggagcattcagaacagcgtggctgtaaatcagctcggccgtgtctgtgaccagttgcttaatatcatctatgacccggcttctgaactcgcttgtggctctttgcatctgcctgacccatctaccactgacctcagccattgcccttcagcacccccgtaacctgacatttcaaattcataatctcatgcatgccgccctggtcgatcggatctgatttgagagtcagcaccttgttctcgtagatgatccgcattgtcttctcaatatcattgcgatacgggaaatacacattgaaatcaaccgggttctgaagctgctgagcctgataatattcccgggacgtaatcccgccgacaaaggcctctattgtgagataatcagtgaatttttcaacatagcccccgccgccgtccggcacctcttcccaacgctgaaatgtaacgatatgcgggaattcttcatagatcatatgactctcagctttctgtatggagcaagaagcttcgtaatgctgcttggcagctctgtttcataagaatatgagacatctcccatacttcggcctgaaaggttggaaggagtcatgttatgctcgatcgctttcgcgacatacagctttacccctgctggtaatttttcatctccattgaccatgaatgagttgttgcaccagtctttcgcttgatctatgaacagaggtaggacctcggccagataggtatcgtggctgtctgtttttatgccaagcatattttttacggtttgaacatccatagaatcacctacacttcaccgagaacaattttgatcagttcctctttaggcgctttgggatcaaattcatattcgttctccttaagaaaggcaacgatttcatccttattcacctttttcaattgctcttcagtcatatcaagaaggtttgtacccggccgttcattcagctctttagattgtttggcctcatccactctcttaaaaccaatgtgagaataaaccacctcaaaagccttttcagtgcattcaatagttttggaaccgttagatgctttcatatcacgcgccgcctccttccagtgcttttatccgattctctaaatcagatagtttggctttcacatcgtcaccgagtttagctaaagtaactgccttggcaccgatgttggcattttgtacactaccagtgccgatgttacgattttggacagaacagtcaccgatattgatgtttttcacttctccgtcgccgatcatttccgaagtgatagttttaggagcaggcgcagaacccgataacccagtcaccttcgcaccctcttttatttcgagctcgccgccgatcaccaatttgtcgccgttattagtgctatagtttttagatgtgtaccccataagcttacgcctccgttgctggtgtaatagcagcaaaagcatcatcggtcagtgtcatgaatccgacttgctgagttacacggagagcaaccatatctctctcatacaagttgatcgggtttccgtctgcatcgacaatcgttgtcaatgttgcatcctctgagattttgtattccatgccttgagggattccgtaacgtgtgtaattccagtcagccgcaagtaatgccgctttttcgtaatcccatgacttagaatccacatatccgatcggaaggccaagggcttgttgtgtggcgccgcctgtcgcatcgttgaagatcggaaggccgttaccgtccttagtgccgcggagcttttgacggaatcggcgtgttgttgtaaagccgtttacatctttgtcagcgtcttcaacaagagccatgaccccgtttaactcatcatatagattgccaagtgagtttaacgcaattgtgttaccagattccttgattttttcaaatacagatacgccttttccaaacggtgaatctacaccgaataacgcagcctgatcaaatttgatcgcaaaggcttcagcgatagcagggcgcatttgtgtgaagaaatctgttacagagtagcgcaagaattctttagaaacagggatgatgacacccaatttctttgaaatcatttttgctgttaaccattgagccttagaagtttggattctctcgccttctccaacccagtaagctcccggtccagaagccaagtacgtgaattccttctccggcttactcatttcttcatattttgctagttttgtgacagcagattgggtcataaactcttttaaaaccagcgttccttgttcggttggaaccttcccatttactgagtcttgcattaatgcattgtttggattaaatgttggcattaaaaatagccctccttattttctaatacttgcttcagctgcaagcgagctgatgtctaaatcttgatttgtcggttcattgctaccggactggacatcacggccattctcttgaaacttggattcaatagccttttgaagtgcagcattgtacttctcttcgaatgctccgaggttcttcatcgttgattcttcatcctcaccgataaagaattccactacatctgccggcagttgcttttcagaagcataagaaacagctttgtttaaaagcttttcacgttgtgccgctgtcttttgatcttccagctccttttcgagcttcctgatccgcttctgctcttctgtttcttctggataaagctcttttacctttgcatcaatcagagcatcgaggttgttcgccttccacgtatcaagaccttttgtaaaatgagaatccaaccgaggctgaatgagacgttttccttcttctgtatctaaaaacccattcaccttgtcagcagacacggcagaaagttcattcagatacgcctttacatcttcgttttctttattttcttcgagaaattttttcacatcttctaaagttggcattacgcttcttcctccttcgccctctacagtgcgcgcctgttatgagtgcatgaaaaataagccttttaacgtcatgctcaggacaaaataaaaagccgctgtttaacgtcttcccttttcctcaatggatttgtaccactcttcataggtttggtatggaattgtttggcctgccccactgccgccttccctcgcccttctcgtatccggcagcacaccgtttactttaaaagcaatcgtacaacggcaatttatgtcatctttcgcattattcatgtgccccggagccggcccgactccgccgtaaattgatttgaacagcccattgcgttctattgtcttcccgtccagtttcctgtgcccggctcgtgttttaagatcaagagtagcattccacatctttttaaggttgctccgttttgaggccttctcagcgctttccatcctcgccgagacttgtaccctatgagcttctgttctcgccacgtcacgggctttcctgcgggcaaattcggtcgctctttcaatgcggcgggcgatcttggaataatcctcccccgcttgtaggccctgtgcgacggaaatttgaatctgccggacataatcgtctcgatgccgcctgtaaatagctgacaaagtcaattcagctatagggtttagaatggcctgccgaatgacttcggctgtcgggatgctaaaacccaagttaaccacggattccatttcaaatagataagcagaacgcatataattctctaaaaactgcttggctgctaatgcctcaacaatagtcagaatggttttgaaagccttgtgagattcctcggccatcctctccatttccttgttcagacgattgtatttgttggcatcggctaaagtaagctggccgtccttgctgtacttcgcatacagccgggcaatttgtgcgttgatctcctttaagcgagacgcaaaaacgacatcaatcttctgagcatcctcagtgatcatgtcgtccaggtacttatcaatatcattctggttcatcttcatcaccgcccgcgtctgtttccacatccgttaacggcggcatgttgagcctgtattcctcttcttcctcttccatcttcttcagctcatactggacatcatcaacaaacgacagcagagataggcgagtttcttcgcttaccattcctttaagttgccctgtcgtttgtgcttcttccagtacatttgccggaaggtttcgcttaaatccgaaccaaacttttttataatcttccgctgccgctttccttttagtgccccatgcggaaaagatcagtttgtattgataacgcagagcagcagtcattttccgctccatcgtgatgcatttgttttcaagcgacatcaatttatatttcatcgcaacccctgaaacattcccaccaaaagattcatcggagaaattgaccgattttgcaaagcgaaggatattctcttccaacctatcaagatggttttctatgatggcatcgtttatatcctttgtcagatagcttacgtcatctttttcgtcaagcaattcaaggactccggtctttttgagctggtcaagcgtctcttcatcagcgcccaacccttttaaaatcaggtatgccagccgatattgctcaatctcattcgatgcatcggacaacgtgcggtcatacgcatcaattaacgaaagaaccttttcagcatctccctttagttccttgttattcgctaaaccgaataaggggcagccatcaaaaagatgcaatgtttttttatcaaaagtgaaggctgagctgtctttcgtactgaaataatagacatatttctgatcatagaattctgctttgatctttccgccgtacaccgtgtaatatcgcaaagcataagcaggttcatggatacttccatcagtaataaaggcgcattcccatggatcaatattttttatacgctcgtttccagaacgatcaacgtaagcgaggcgggcgccgtaaccgcaaatagaggccattttcccccactcgctgtcttcatcagcaatgttattttccatattaaaattttcgatcaactgttttacaggtattgcagtgcttgtcgtatcgctctcatcaaactcatatgcaatagggtggccgaacaaatagcccacctttgtatcaatgatttcagagtcaaacgagttgttaagcctattgtttactttgtgatcaatacgttttaattttcctgtttcaaaatcttcgtattcaatggcttctctggataagatcggaacgccttgaacctcagcctcgtaccgttcataaagctttttcattctgtcatgatccggcttatgttcctgaatgatcttgtcaatcaattcaggcgttatgccggactgttcaatcatgtctataaaatgattcatcagctcacccctctccgtcttttcggtttattatgcgaatacagagcgtaccggagtgagtccagcacgtcgtcccattccttaaccggttcgcctgtcttctgattccagacgtacataaagatttcttttttgaaccggtcaactttgtcttcaacaacaaaaagctgttcttgtttgaacagccgcgctacttcttctataccggatacgacagctttatcagcgttaatagcccgaagtttttcacgccggaaacgaacaacgtgttctggtcgtgccgtatcacaatagaaattaatgtttccgtaccgctcttttacgcctttcgctaccttcacccagtaatgaatttcctcatgttgcttggcatattcttcgagcaaataaaaacacccctggtcatcttgtccgattacaacaatagaacccgggtgctcatatccccagtcaacgcccgcaaaatacttcttgaaattgacgcgcctgttttccaattcctcagagctgatatagtggatgtccttattgaaatccttgtatatgactccttctggcgccacccaataaccgtgtatatcccgatctgtaaacatgccgctcggcgttgatgccacgatgctctccacatattccggatcgagaaaattgttgtcgaacagcgagaaatgaaatgacctgatgttcagccgcccgcttttcagcatttgcccgtctttgtcgatataatccgttttgacggtgtgcatcgggttttcgggatttgtatccatcatgaccacagcgcctttatacgagcaccgggaaatgacttctttcacgaatgaatcgtgcagggcagtcgcttcgtttaggaatgcgccggctgatgtgaacccccgcgcttttttccatgaatcagcattggctccatcaaagcaatatacacggttgccgaatatttcaacggcattcgacttgtcgagcctcaattctttacccagaatcagttccatatcgttcaagacatttcgttttatggctgcctgagtagccccgccgatgatgaaggataaacccatattttgatacttactgacgtgagcaaggaacgtcaaaaggagcacgaatgtttttcctgccctctttgcgccgctacaaattagaattttgggttgctctttaataaagctgtcccaaacttccttttgctttttattcagttccatcggcattcaccatttttctcaacattgcagcaatatcattttcttgggtgtttccatcgccgccattaacggtcttcttcgttttctcgatattcaagcgcatctgttccaatttaagacgccgctcatcttgctcatgcgccagctggtcaaattgcttgatcaagctccggagctcccccattgcccgagattgagcgtttaagagagtcgcatgacgatcccaagcgaactgtatttcaagttcttcttctacaatgtttttttcatatgttagattgccatcttcgtcctcatcttgatgataagcgtattttgcctttttaagctcttttgccgtatcatctttattctgcacaaacataatgcgctgcgcccgaataatagccgcatattgtatctgaatctgatcccatatcatatcagcaggggaacgctcctgaatctcttccatgatttcaagcgtttcttccggcagatactttgagaagaacccatgtgatacagcattttgatttcttgccggagccgccccgccgctatttcctaatgcgtttttgttgccgggttgcccgcctatttttgtgtgcacacttttttcggtgggtgcaccctttttcctttcccaaccatgccgctgcttccacgatttgatggtgttcactgacaccccgtatttttcggcaaggtccttgtatttcacgcctttgacgtaatccttatacgcctgaatgtgcttttcaaccatctacattcaccgccgcccccttctgattcgtgtttgttttggaaaatatattccctctaaaccgacgccgcactcagaccgttaaccacctatagttttcctgagacttaccggaaccggtttacaaggaacaaaaaaagcacccttaaaggtgcaggtgctggctttcatttgattctatttctttcataagcgaaaatataatatcagccttaattatataattcattggatacttaataactggttgctcctctttctcacaatttatatagtttactatttgagctgtattaataccaaccaccttattattataaataatggggccgccgctaaaacctccataactaaacatattgcccataaaatagtttaaatggttatggaacaaagacactttgccaaatgaataaataggaagatgctgatttgttaacataggattgacgacacctaaatcagaaaagtcaggataccctatcaaacatagatcatctcctggcgttaactttttatcagaaatgtgtttaaaatccaaaggtgtataatcggatgattctaaatttctcttaaattcaattgtctcattaaaattaagtgatataatagccaagtccatctcaaagtgattattttcataaactacaggcgcctctccagactcaccagatcctaatcgatatatttgatcgacccctacagttttgagattctcagcatatttgtttgctttgtttatagattcatggagctttcctgaatttctattcacaattagatgcttcacagtaataagatattgcttattaccttttttcacataaagagcagtaccaaagtcttgtttatcttcactgtaacattttaaatgaacaattgatttttctattcttttcaaatccatatttctctcaccacttctagaattaatctgaataatataatatgaacaaaagtaacttaatgaaacctatccttttttcttctgtttacttgccttccaatccatatactcatggaatactgtaggtcctgtcacatcgtattttctaccaatccgccacaactcatcttgcatatctttttcaatatcttcccatgatctatgcccttgtttctctaaaaaatcattaaattcttttaccattggcatcatattctcacctcccaccttattatcggttaaggagtgtgataaaggaactatttgcaaaatttgtcgaacgaaagcacttttcataaataggtggcaaccgtaagacaaaaaaacacccttttaacagggtgctcatttccgcctatgtttttggaaatctaaaatatcctctttcagaaaaagcctgtcccggggcatttctttcatcggctctaattccccggtctttactaactggttcagatactgacgggtgaaccccaatatctcaagcgcctcacttgtattgagtatctcttcattcaggaatttcttgattgcgtcacgctctttaggcttgtacatttttgaatcatccttttttctcacgatatttcaagtaaagggaaaatgctttctcgatgatcgaaacaacaaataaaatgatcagactaatgtcgagagccgttttcaacggtcccgctgccacatcctgacggaaaaacagcatatacgccagggcgagaagaacaacaatatcagtagtggactgtacacttttcatttttttgaaagtggctggctttcaagtatttttctttagtcgccgcatttgctatacttggagcaagggagaagcgctaccttctccctcggctcaaaatcatctgcgctttcttggacgtctgcgttttttgattttgggcttttttgctttaagcttttccctgatgatgaggactttctcaacaactgtgagagttgtgaggataatccccagtaccaatgcgatttcagccactttctttccctcctttctatacattaattatacatcgtttatttactcacgtcaagtaatttagtgggcttttttcattatttctccaataaaaaagagcctattcacgctaaacagaataggctgtgatctgctctatttttcattttcaggcgggaacgttcgatgttcttctgcacagttccttttttaatccccaataactgcgctatctcttcgaatgacatgttttgtacagcatgcatcatgaaaatgtctttttctctttcggtaagcacggatagggcatcagcgattctttccttatcccaatcacttacttctccctcagcttcttgaacgattgcgtattcttccggcagcgcatcaattaagcgaggttcagcaagaatcgtcctttgatatgcgtctcttctgtcagcacctcggcgtgcgcccggctgtcttccgttctgcagccattcaagagtgaattcaatatcgctgatcatgctactgataatctttttgtcgttgatctgttcagccgtcagattgacttcagccgtatctttgtagagccgatacatttttcttgtttctcttaaagctcgtttgtactcaatgattaaatcttgcattctgattcctccctttatttgcgcttaaatgcgccgcccttgcctcgtttaagtgtttgcatgtttgtgttcatcatttgttgccagaaacgatctgagcgctcctgcatgtttttattgggctttttctttttctgcttcatgtcatccctccgttcaaataaaaaacggacaccaatcagagcacagtgattctgtgcaatgatcagtgtccgcaggctttccgtcttggacttattcagttaaagcagcacatatgtagcaatgttcccgatgatcgctactatacaaattgcagttaagtgatttcttagctgtgaatccttatcctctcctataactcccataagagagactatcaggaccagcaagagagctattttaaaggctattaacatctctctcctcctaattaagacccatttgattcattccggatttaacagctagaggcaccacgtccgccggctccacatatggattcttcttgtattcctgatagtaagccacaatcagctttgacgtatggctaacaagctgcagttgtaaaggcatacccttttttaattcatcaacaatcatttgaagttcaatctcagaaaatccgttcatttgtcttccctcttctctatatacttatcaatatcttgaaaaaacgccgcggccgtgaatgcgatgattgcgcctattaacgtgatgtttgctttcatgtccggcctgtattcgtactggaaataaaaccagaaacctaaccccatcagcataaaaactattctcagcgccatcgaatcccccttatttgatttgaaattttgctgattcaaatgttccgatatagttccacttgccggaatcagagtagcagtccagctgaatgacataggtccctttcccggtcttattccggatcgttttcacgttgaatgatttcagaggcgttgccgttttgaagctgcctcgctgtaccagattcgtttcagtaagcccgccgccgctacgcttcttgtatacgccggccgtgtaataaagagtgcttgagccttttttctcggctttccagtccaccgttgaggcgccggccgtgtaagtcgcggcatccgtaaacacccggccgctgtacccggattcattttgccagccggaccatgctgcggaagcagacggcgcaacggccgcggctcccataagtaatacagctgatagaatgattgatttgaatagttttttcattattttccccttcctagttcacaaataattaacatttatttacaaggataatcattattttgctcgaattattactgtgttcaataaaaaacctaaggagtgtttaaaatgaatttcaaaaagactgctgttactgcactagcgattcctgtattagctttttccattagtggtatggcttccgctaaggagataactcctcaaaaaaatgaaacgcaaacaactatatctcctggtccaattaaagcctattacgatacctttgaagtgagagccgggggttctaaacaattagatgccaaatatttaggatcaggattcgcttatcattcagataatagcgctgttttcacagtagataccaatgggcttgtccgtggcaataaagctggaaatgcatatttaactatattcaaaaatggatcagtatacggtcagttacacgtatttgtctattaattttctaatagaagagcattctaatatgctcttctattttccacttcaccacctatgcagcgcccacaatgcgggcagcgggcatctgcgcggatttctaaatcaagttttttataatctcagtccgggcaatgatattcgatcatttactatccgcccattcatcaaagctgtaggggtaatcaacactttcaatgaaaccaatctccttcgccttctgacggattttcatacatccttcatagctgtaagcccatatttctttataatccctcagctcgccgcatttccctgttatgatgaattttctgaagctgttgaccagttgccacatgttgcccccatgcgaaaagccgtttgaactgccgtatcccaattcatacgggtaaacatcagcgcccgtgtaatcatcaacgaagaacagttttttcttaaatctgaaatacgctatgcgatcctttgacttgcggtagaatgtacgatgatcaatgcttgcgataagcttgatcaaatcgtttatgtcgttcattcgtttcaattgctctgctgttggcattgggttccctcctgatcaaataagctgagttgtgtgattttatagttaaatagcaataattcttcagccccgcggctttttccggatccgccgacaacctgtttgtatgcggaaaaggtttctgactcccagttcgggtagatctcgagtatcaaaggatcatcgtaataagaaagaaccactttccctttgacctgattaagcagccgggccagttcccgatgatcctcttcgttaaagccgccagcataaaaccgttcacgcccaacatatggcggatccacataaaacaaagtatccgggctatcgtatttctcgatgatgttacgaaaatccttacattcgatcatgacgcccttcatacggttggcgaaagactcgaaggcagcgcaggcgcttatgtatccgccagcagggttctgcccgctttgtgtgctatgcctccagcctgtctgcggcacttcctccacgttccccttactaatgccggagcgattcatataaaaccacctgacagcccggtcaaaatcattttgcgggtaatcttcagttttccatttctcatagagcgcccggctgtacggaatggattcgcaagcctgctgcatggcctttggatcctttctgacttgcatcaagaaattcaccacatggccgtcaatgtcgttatacacttcatgtcccatttgcggcttattcgctatgacatgagccgcgccgccgaaaggctcgacgtacaccttatgggcgggcattttatttatgatgtgatcggcgtatcgacctttgccgccaaaccagattaacggtgagcgtgccatcccttaacccccgatcaaattcggcagcacggagatagcgaagaagaaaagccccacgcatgccccgaccagccagatatttgttttatcccgtttagcgataatggtatggtcaccgatcattttcagatcgtcagaccgagcgaccagcgtcgggatgtaatccgggtgaacctttaaaagctcggccgcctgctcgacggtcatcgcttcgtccttcgtggccttcacgttccgttgtagttcgacttgtaatggcatcattttgcagcaccgcctaacatttcgggattctgatgtacgttgccgattaactcaccatacatttgaacaaaatcccaacgtattccacccgcataaaatccggcatcatcttctgaccatttaacgactagattaaacacccggccgtgtgatttataacagataatatctcccgcatatatttctttttccataagctttttgcccgtccataaatcgcggctgatcaactcgtaaccaaactcttcacaaaagacgggagacagtttgcgcgccgggcgttcttcaagctgactgatatagtacgttttcaattcaacattgcctgtttccttatgtcggaatacgtatcggatttttatgttattcattccgcagccccctccaatgcttttctggccgtttgccctccgtcgagttcgacagcaggcggacagtcttcaaattcgtttgtatacgtcgtttcattggcgtaaaattctaatgcgtttctataacgcttgttctccgcctgtagcaacttaatatcttcctgagcctgccgaaactgaatgaccgtgacatcctgctggcgctggtgctcccgattcatagcctgttgcatgattaactcttccgcgagcttttcggctgctgcttctaaagatatttgctccggtgtactggccgccgttttcgaaagggtgcaaatgtaagagccggtatataaaacctcaccttttgacaagttgattttgaattctttcatgcccgggcctcccggtctaaaagacatgttttgcatacaacccattgagctgaataatatatttttccgcagcgttcacacttgcgggcaatttcgttttgatacattttccgttcctcccccgcaggggaaaacccctgctaattgaatttatggccgatctcgtaatcacaacgagccaggccgccttttattgtttgaatgattgttttaccgtgttccggggcgtccattagatgagcagtcccttcagtgccatctaaaacgatgatgcggactttccccggctcgatgctttgctgaatagttgtttcatgattttttatttctgtcggcttgttcactctggccgccccctgtgctatgatagaagtaccagttcatatcagagcatcggggccacggcttcggtgcttttttacgttttacgacggcagccgcatcgttactccggcagatggttttaattcctcgcggtaaatgatcggatgcttttcgatgtaagctgccaattgctccggcgtcattttccacttcttaactggaccaggcttgtatcggttgatttcttcttgcatagcgataacctcctgaattgatttagttctcaagcatcaaactttctccacaaagcgttatggcaggatttccgttataatgacttccacccggggctcttcactgtaaaacttgctaactttcagatcgactacctggctatcatcccggtaaatcagatgattcagggcgtctttaactccctttacatagttgtcaacgtccggctttgttacgggacgcaggagacccttttccgcattttctctttttgtcttggaattagaaatttctttcgtcattggtctgaatactctgacatccattgccacaggtcccgtaataacttgttttggccgatactgtgacgccaccagcgcaacatattgtttaaaattctttgatttcaaaggatcacgcattttaaccttgccatttataacagatcccctcggccttccctgtgcaacaggctcgccgtaaactataaactgaatggaatccaaccgtcattacctcccgtcaatttgttcccagtgctgaatctgcttttccttgtacggcgctgtgaggatgatggccggcagcagtataaccgctttaagcactgtgcatcagctccatttgtttgattttttcctcaagcacccggatcgccggggtaaggtcctggccggccgtttgctcagcaggcccgaacacgtacatgccgccggttgctgtgaagttcgctttttccgtcattcccaatctcctaacctatggtttaattgcatccgatcgcccttgatggtcactgtgtaatctctgcacatttgatgaatgcgggagcccagcgcctcgtctatgtccaaaatttcccccgtatcaagctcggaagagattagcagaggcttatgattcaggtaccgataattcacaaccgattgaatttgttccacttgccaatccgtcgcccgcggctccccctttactggtttgaataagtcatcaatgaacagaacttcagctttccgcatagcgtcgagctttgtttccagctgatcaaagtcatttcgcagatcgcccattccctcaacgtacgggaaatacatgcagtaaattgattttttcttaatcaggttgttcatgatcgccgttaacaagtgcgtttttccgctgcccggctgcccgagcaaagcgatactgtttgaacgttttcccttgatgctctgaaaatccttatagtattccaccgcgcactcataagcgtccttgatcatatccggcttcccgtccttaatgaagtttccaaaaaggagcttttcgaattcctccgtgatgccgctggccttcataagccgggcgatctttttccgcttcacacactcgcattgcttggaaaatgtggttttccattctcgggccttatccggcaagcatactttccccgcaagataatcctcttctctgaccatttgatcaggggccaggctttccattgtcttatgctcttttctcaattggcgctcggtgtcttggtgaatacggtaaacaataatgcccttatccttgcagtcagagcactcgtattcagccttttcttctgaggcggcctgtcccgttgaagatgctgctgaccgatcccggagcttggttagaattgccttcattgccgcgtccatatcttgcgttttgcgagcttccatactgctgtttctcctttcgtctctggctgaatgggtttgagaggatggcttcaatgtaattcagattgacgttgttgcccttgaatctgaaagcctgtttcattgcctccatgactttctcttcaccgtaatcatccaccatatatccgagccgctgaacctccatcgtgccaatggtgcgggctgttttgttttcgaatagttcaaatgcgtttttcattttttcgtcaacctcctgctgtcctaaaggtattggagccgggtctatcttcttgttgtaatttccaagctgtatgtactcggcataattcaacaccgtcacaatgaaaccgcgtttttgcggcagccggtccagcttcaaatactcttgctttaccatccgatctaacgagtatttgatctgatcagaagaccagttgaagcgcttggctaaatctacaagcttaatgattgtctgcccgagctttagttcttgatctgccctgtactccgcccgtttgaataaataatcgtatattgtctcgtctcgtgaatctttaaatggcagccggggcaggaccacataccccaaaccttgcatatccatgccgctcacctacttcctttcacacagtgctgtcagagccttgaaatctacttctactaatctcagagacggctcatttgtctttaagtagtcagtcgtgtaccgggtatacaagtcctttctcaagtcgcgctgaaccgttttgaccagccagagataacaatgcgggataggaatcctgatcagctccctttccatcagctcaccaactccgaaaaatggatgatgctgttcagttgattagtggcccggcaatacttgcatttttcgcatcgctctggtttctctccgccgtgtttcacttgcaaaatccgatccatccgctgctcaatctcttcaagctctatttccagcctgccctcatcaatattgatgacagctttatcaggtggatcttcttttgaaacccctacgatcaggggctcaagccattcgctccgtccagtcatccgtttttcaatctctgcgtaaagcgccatctgagcgatgtatccgtatgcctcaacaaaagagcaatatcctatttccgggtcccaaactttctcccgcaatgaccgcgctgttttcagatcggagaaacggccgccagctgggttgtatacgtccagctttcctttccacggaacaccgaacaattcagcagttacgatgacttccttttctccttgaagaacaaacatacagagatcatcattttgaatcgcctcaatcatcagatcagctaactgatactgcttgtacagctggcccttttgtgtaaaaagtgatggggtgttctttttaaattcatcaaaagcctgttcaccctcaagccaggcatgaacgtattggccgaagaggagcgcctccgatgtgggcggcgtccattctccgttcaactttgccatcgtggcagcctcgcattgcaaaaagcttttatattgagaatttgacatgtagtgtctatcaatctcgttagagtaataattcttcttgttcagcgccggtatccgcattagcaggatcacccgccttttctttactatcagcaggcttgtcagcttgctctttcagctttttgaattcttcttcagcctttgatttagtcgcgctagtggccttcacattgaagtaatcctctttctttgccatcccatcacgcagggccgtgtaaatacgaccaattttcaggaaatcttgctcagtgaaggcatcaacattactgccgatgtactcctgaatcatttccttagtgatgccaaactcttttttaaaaagggagaaggcacttctgagtcggtcttccagtggttccttatgtccactaatcaatgttttttgacacatatctaccgccgcatcaacgatgtcgcccggaatcactccaagtatgcaagcacgaacccggcgggctccttgattggcaaccatttcgtaaatatcccttggatcatcaagtttggtaatggcgccccgtgccttccgttcatgcttcacagtgaaaattttggtttgccgggtattcgtttcaagatcccaagcgtaagccatgacagatgattcaccggccttttgttccaactccataattccgtaatcaatgttcccccagttctgtgccaaggcctcagccagccggatggatgggccggaaacctttgtgccgccgcgcggatattcatataccgcattctcagccaatagcctccgctcgcatgcttttttaatccggtcaaaagccgcgtatacgtcccgtgggaatttctttgcgataaccattgccgcttgtacttcttgagcctgtcggcttaccatcgcttccatagtcacgccagtagcctgctggggcgccggcatgtaatctgagtaatccacctgtgataatccattcattgtgcttctgccacctttcttttatatgcttccgttccaagccgctgccattcccgatagtgatccattgaagggaaactaaactgcgctttaccgtttttggagaatacaattgagccgccgacctgccttaaacgtcgctgatcctccgcacgctcactgaatgccactttaactgctttagccatgtataaaacctccattgttttttatggggcgttttggtataataggaatacaatcaattatcaaaacgccttacctagtccactctgccaagtgggcttttttattgctcatttttaaattcaaaaccaagatgctccttcagataccgctcaaggttttccctcaagatgatttcaccctcagcactatctatcacgtaatcatcgaaagccgttacttcatccccaaagtaatccttttgcgtgtccggctcagtcagtttgtcatgccagttgttcaagaccatcggattttcaatattcattgtgaacacctacttacaacactcaggtgaatcccgcgggccgccatatttaagacagtttgatgtaagcgccctttattcgtcagccggtttatatcctctgtaagaaccttgatgctccctgcaagactgatagcttcttcataatcgccatcccgcaacgcctccgcaagcatgatagagagcctttccgccgactcgattttcctttttgctgaatctgcatctgctttaagaaactgattgattttcataccagcaccgcctgcctttcttctgttttcgccattgcaacctgactcattagcgctttccgcgtccacctttcggccagttccttcatgttcagtccatgactacgggccagcgaatatatcagcgttttatttgctgggatcagatcaaaaatctgctttatatcggccatgggcagttcttcaggttgtcggcctggcctatcgtttgccaaccagcgcgctaaatgccttgttgcttgtaatgcttcttcaagctggtgaatcatattgattaccgccgcgcttgcactctcgttaagtgctggatcaattggcgccgccgtcgtcgggtgcaatttgaagagataatgtaccagatcaatatgttcgtatgcctcgcacgcctcaaaccacttaatgcataattccggggtaagcttactgaatccattttcaacgtccgaaacatatcgctgatcctttccccctatcaaattaccgatctgatactgtgcaagtcctgccgctttgcggacactacgcatgatccggggtagattatgcaaattgtatgggttgttctccatatgtttgcctcctgatatatccagttgttcactggtaaaatttaattaatgaagggacaagctagtccttttctcgaacattaatctccccaaatttgtggagattgtttcaagctgtttctgatgaaatgaatttattcacaaaataaatctgaccttttcccgtaacctttggcgttcgggtagttctaattgaaccatcagggttattcattgttctcttcttaatttcaaagagacccaaatccatacttcgctgtgttggtagattgaaagactcgcctgtcttacgaattaaataaccattatcacggagccattgaaataacttgttaggtccaatctttacgccgttctgttgaatgattttcgctaactcgccaacaagcacagatgattcagatgcttccacggcttcggcgaaaagagcttttggcttcatagattcaatttgcttattttgctcctttagtgcgtgaagagttgttttgaaaaataatttggtattttcgtctgcgttggacaaatacgtctgaatgaactgttcatcatttgcgacatatcccccggtttttctgattgtgggtataacttcaaaggctaaccaatcttgaaattgttcggcaatttgattagatgctctaaaagccagcttgtacaccaatggttcaggaataaaatcacctttctctacttctggaaagttatccggaaggtaagtattcacacggctccatcggattgttacgttgccacttttggcaacggtagtgaggcctaagttccgagcaacttgctcggcatcaaaaaggatttgatcattctcaattttggctgcaacttcgaaaatttcatttttgaatgtttgtaaattattcatgccgaagctcctttctgatagtatgcggtgttctcagcaacccaacgcgtgttgctctcaatccatttaaaaagcaaagtcgtagggatttttttgccacattcttcgttaaccggaaaatccggacgggccatcagttccgccattttagtgggaccgcaccgcagcacctccatcgcttcagttctcgtcaagatgtgaggaagctcgttcaaagagctgagccgctctaccagcatgtctgttgctctatcagcaattttggcagctatctgttcaatgaatttctcatcgtattgcatagtgaacatataaaaaacctcctttacaatgagctttataatctctcactttcatgtggtaaaatatgcatggaaggtggtgagatttaatggcttctactaaggtttacgcttgcctttgtggtgaatgggttgacttgactagtgatccggactgcaaaataggtgaatctatgtcttctccatacatatggtgggaagaaggtgcttcaatttggagccctaattctaaagaagagcacacgatgtatcagcaagattacgttaatatttattacaaaaatgctgaatatcgcattcacccaatgtttatccaaatcaagtattcatcctaaattcacgtttaaggttagcttctaacagttctgggtcgtcaaactgcaatttggcggctttagaactgaacagtacatcgacatgttgtttaacacggctccactcggattgggacataccattcaacaaatttttaatttgttccagctttttttgatccataacttcgacctcctatactgtttttttgtaactttcattcctaagcagttttctcgttaccctttttgtgtaacttttcattaaaaaaaagctcatcgacttcttcattcagtaactcggatatttggtgtgctttttcaagacttggctttgtacgccccatttctatatttgcataaccgcttgcgtatctatagccaagcttttttgccataaaagtttgggtctttccttgagaaagtcttgtagcccgtaatttttctagcactattaactcaccaccttactcttttcgtgtaactcgttaaatacataataatatacacaataagggtaagtcaacatatttttattctttttgtgtaagtaattatctcttgtgtgtaaaccgtgttaaaatttacacaccaaataaaaaaaggtgtataataatggataatataacagggaaaatcttaactgaattaagagaaaagaaaggctggagcaaatctttcgtcgcaaaaaaattaggtattaaaacaatgtctacatatgcgaactgggaatacggtttaaggaaaccagatggagaaatgctcgttagacttgcaagtttgtatggtgtaacaactgattatctcctaactggcaaagaacctacttttaataatgacctttttgatgatcctgatctacagatcgcctttagagaagcgagtgacttctcagaagaaagacaaaaacaagcaattgattttataaagtacctcaaagagaaagaagaacgtgaaggccgtaagcctaaaaagtaactaactgccgaaacctttatttatattattgttattatgttatttctgtttactaataagatcaggattggatcgggattagaaccgaactggatcggaaaagaatttttcaccagtaggttgaagccaattatatcaagggaaatagaattctttctcatctggattgcatctggattcaaacgggatctgatcagaaaaaaatatactcaagtgtattacttataaaggggaaattaaatttgtcttttttgatggaaaatggcgaaatctataactgtcagtttaaaaaacgcatgaaggcttctaaaaatttcttgaaaacttatgaagcagctaaacctctgattgatgaaagaaatgaaacaattcatgaactcgtttgcggaactatgaagagtgacgcgacatgggggcattttattgctacagaaaatcaagtatatttcattgtcttgaaaaagaaaaaaccaattttaaagaattggccctataaagaaataattaaaattactgccagtcgcaagccattaattggacataagattgattttaaaacagccgaagaagacttaaacatcaattcaatatcagaaggtgatattgacggctttatcaaatatgttgaatcaaaaatctctggcaatgaggaaagatacgaaagtgaaaaagaggatttaaagaaagaaactaaagaatactattttaaatcagcaaaaacaacaatcacacttgatggaaactatataagagtagcaagaaaaggcgctgttaacactatcacacgagggtatagtggggagaaatcttatagaatcagtgaactgtccgggcttcaaataaaaaaacctggattagtaacctcaggctattttcaatttttaacgccagctgctaatgaaacaagtggactctgggacgcaatacaagacgataactccttcacttttggcgcaaatgaactgcctatggttttagaaattcaaaaatacatagaagaacatcagtctattccagctccaacaataccaccagctcctgcccctactgtatctgcagctgatgaattgaaaaaatataaagaattgttggatatggatgctatcactcaagaagaatatgaaattaaaaagaaacagctattgaatttatgacagcccttcttcctcgggcttttctttcacaccaaaaacagaacatacattccctacatggtggtgtttttaatgtcaatccagttatcgtatcttgaagaagaagtgaaaaaaatctattacaaattaaatattgagactcctgaagacattgatttagaaaggattgccgcggcatttcgtatctggctgcattatgagcaaagagaaagctgcatgtttcaaattaacggtgagtatagcgttgtccttgatgctcgagcctctccgcaagaacagtggcaagactttgttcatgagctagggcatgtgattaaacattgcggaaaccagttcaacatgaatcgtatgtttcgccagttgcaagagtatcaggctaatagctttatgtatcatttctgtgtacctagttttatgcttgaaaagatttcgttgccacgcatgaaatcagaggttataaaattaataggtgatacctttaatgttacatatcaatttgctgctaaacggctcgatatgtatacaagaaaacagttctcattcttgatgtataaacagctctttaaaactattcattgaaaaattggggtgacaaaatgtatacagaggaattgatcaagggtaaaaaatggctggctgttggtgacggacctcgtgatcccgttaccggtaaacgcaaacaaattgcgcggcgtggcaaaacaaaaaaagaagctgaacaaagagttagagatgctattgatgccttaaaagaagatggcattgatgaatcagttgttaaaaaaatgactttcgaaaagcttgctgccgaatggttgaacgaatatgctctcacaggaaagaaaaaagcaactctgcgtattcgaaggaaagaaattaacatcttaaaccggtatatcgctaaaatcaatatcgctcaggtaacaggaagaaaatatcaaaaaatactcaacgatctcactgatcaagaatatgcccgtaccaccattagtggtgtgcatacgacagccggaatgatttttaaatacgctgtaaaggtgaagcttttaaaagataatccagtggctggcgctgtagttcctaaaaagagaatgacagtagaagatattgaaagtagtaaaatagagcaaaaatatcttgaaagggaagaacttgaagagttcctcttagcagtaaaagtccatggtttggaaatggaccttgaacgattttacttgctcgcttttacaggcatgcgttcaggggaaatgtgcgccctcaaacttcctgatataaattttgaaacaaaagagctgcgtatcactaaaaccatatattccgaagataacaatatgagaaattatgaattaactccgccgaaaacagccggatcggtgcgaactatcactctcgacgatcagataatagatatattgaaggcacatgtaaccaaacaaaagaagttgcgcctacagtccaggattgatccaagcgaataccacgacggtaatttcctatttgctcgtgagaatggctatccctttttaccaaaaaatatcattgtaagaatggaaagaatactggaaaaaacatcaattaaaaaacatgctactccccatatatttagacacacgtatatcagcatgctggccgaggcaaaagttgacttgccaactgtaatggaaagagttgggcatgacgacatgaaaacaacgatgaagatttatactcatgtaaccaaaaaaatgaaagaggatgcctcccacaaagtccagcagacttttggaaacatcctcaatttcgggatttcataaagaaatgttatttttttgttattttttcggttaattggggtgatgaaaaacggtcaaacccttggtgtatcaagggttttttccgtttgattacatcatgccgcccataccgcccatgccgcccatgtcaggcattcctgcgccgccggcgttttcttccggtttgtcagcgacaacggcttcagttgttaagagcattgctgctacagaagctgcgttttgcagggctgaacgtgtaacttttgtcgggtcaacgatacctttttcgatcatgtttacccattcgccggttgcagcgttgaagcctacgccgattttttcatttttcaggcgctcaacgatgacagatccttcaagtcctgcattgtgtgcgatttgacggatcggctcttcaagcgcgcgaagcacgatgttgatacctgtttgcgcatcgccttcagcttccactgcagcgactttgttgtatacattgacaagcgctgtaccaccgccggatacgataccttcttcaacagctgcgcgagttgagttgagggcgtcttcgatgcgaagtttacgctctttcagctcagtttcagtcgcagcgccgactttgatgacagctacgccgccggcaagtttcgcaagacgctcttgtaatttttctctgtcgaattcagaagttgtttcttccacttgagcgcggatttggttgacgcgagctgcgattttttcagtgtcgccggcgccttctacgattgttgtgttttctttcgttactacaactttagaagcgcgtcccaattgtccgatttcagtagatttcaggtcaaggcctaagtcttctgtgattacttctccgcctgtaagaacagagatgtcttcaagcattgctttacggcggtcaccgaagccaggagctttaacggcaacagcgttgaatgtgccgcgaagtttgttgacaacgagtgtagcaagagcttcaccttcaacatcttcagcgatcagaagcaatggtttgccttgctgtacaacttgctcaagcacaggaaggatttcttgaatgtttgtgatttttttgtctgtgattaagatgtaaggattgtcaagaaccgcttccatcttatcagagtcagtcaccatgtaaggagacgcatatccgcggtcgaattgcataccttccacaacttcaagctcagttgtgaagcctttagactcttcgattgtgatgacgccgtcgtttcctacgcgctccattgcttcagcgataaggcttccgacttcctcatcagcagcagagatcgcagcaacctgagcgatagactctttgccttcgatcggcttagaaatttcttttaagttttcgattgccacggttacggcttgttccatacctttacgtacgccgacagggttagctcccgcagttacgtttttcaggccttcgcggatcatagcctgcgcaagtacagtcgcagtcgtcgtaccgtcaccggcaacgtcgtttgttttgctggctacttcagctacaagcttcgcacccatgttttcaaacgcgtcttcaagttcaatttcttttgcgattgtcacaccgtcatttgtaattaacggagaaccgaattttttctccagaaccacgttacgtccttttggccctaaagttacttttacagcgtcagcaagcgcatcgacaccgcgaagcatagcgcggcgtgcttcttcactaaacttaatatcttttgccatgttaacgaaacctcctcgaatttttaaaaatatttatttgcttagccgattacagctaaaatgtcgctttcacgtaagattaagtattcagtaccttcgtatttcacttcagtaccggcgtattttgagaagataatgcggtcgccctcttttacttctaaagcaacgcgctctccgctttccaacacgcgacctgaaccggctgccacgattttgccttcttgcggcttttcttttgcagaatccggtaatacgattccgctggcagttttttcttcagattctacgagttcaatgacaacgcgatcacctaatggctttaacaatgtaataacctcctcaatagtatgaatatgtaattttagcactcagctctaaagagtgctaacacagttattataataaagaatctcacttccaatttcaagtcataagaataaaaaattttcacgcttacatgattctctctcgcactgattttctccttttttcacgtcaagttcacttgtgttacaataagaacaaataagttgattttataggataaaggagtacatatcatttgagaaaacagtattggtatatcattttgacatatgttatcatgcagctttccgcattgatcggcattcctttaatgtacaaattcggctatgcgggcgggcaccctacgaatgcgaatctcaccatggctcaggggatttattccgtcgtaagcttttttatctgcctgattatcgttctcttgattttgagaaccgcgccgaaacagacattaagaaacgggaagaaagcatccgccggcatgtccgttctctgggcggtcgcgggaatatggctcgctttattttctcagggaatcgccgggatgattgagcagtatgtctttcatgtgggcagcggttccgaaaacacgaaagccattcttaacattattaaagccatgccgctcatgattatcgtttcttctatcgtcgggccgattcttgaagaaatcattttccggaagatcatcttcggtgtattatatgaaaaaacgaatttctttatcgccggactgatcagttccgtcattttcggcattgtgcatcaagacctcacgcacctgctgctgtatacggccatgggctttacctttgcgttcttgtatgtgcagacgaaacggattattgtgccgatattcgcccatgtcatgatgaataccattgtcgtggtcatgcagctcggccccgcccaaaaatatattgaacagcatagtgagcaaatgcaattaattattggaggattgtttgtatgaggaacccaatgacttggggcttgatttatttcgcagtcggctgtatctttacgtatttggccgcaagctctccgggaagcatgtggtctttttattccatactgctgatggttttcgccgcttataatatcagcatctcgtttaaaatgttcgccttctcatttaaagtgaagaaaaaccaaaaataataaaagaaaagccatttctcatcattgagaaatggctttttttatgctgatacgtcctggtcagattcactgccggtctgccttttccgatacgccgcttttgaaatcaggatactgatctcgtataaaatgcaaagcggaatggtaatcatcaagtgagacagcagctcaggcggcgcaatcatcgcggcgatcacgagcagcacaaaatatgcgtacttcctgatcttcgataaaaacctcggcgtgataacaccgagtctcgttaaaaacatgatcagcaccggcatctgaaacagcagcccgaacggaatcgtcagctgcagcagaaaatgaaagtactcggtaatcccgattacctggttgacatccaggtcattcgagacccgcttcataaaatcaacgaccagcggaaataaaatataataagaaaacgacacaccgccgacaaacagcacgatcgaaatcggaatatagctgagtgttactttgcgctccttctcatacagacccgggctgacaaacgcccaaatctgatagagaataatcggcgaagtcaaaatgatgccgatgataaacgcgaactgcaaaaagataaacagcggatccgtcaggttaaaagcattaagggtgagctcttttacttcatcggctttttgaagatacacaatgataggttttgccagaaaaaagccggcaataaagaaaaccgtaaaggataacgccacaatcagcaatcgtttccgaagttcggcaatatgctccacaagcgtcatttgattcactctcatacgcgtcatcctatcttactgttcttctttctttttttcctcttcttcaccggctaatcccttagtagcgttcttaaattcacgaagcgtgtcccccgccgcttttcctaattcgggaagcttcttcggaccgaaaataatcaccgccaccacaccgataaccgccaggcttccaggaccgatcatgtgcagctcctcctttcgctattcaatttcttccaaaacagaataatgctttaagaaataaaccaatgattgaagctctactgctaaatctatatgatgaattcgaatgtgatccggcacattcaaacgggccggcgtaaagttaaggattcccttgattccgagtgacacgagccggtcggtgattgactgggcggcaaccgccggaacggtaagaatcgccacgggttcatcctttatgtgaagctctaaatcattaagatcaaagacaggcacaccgcctacctcagttcctattttactctgattcacatcaaaagccatagatatttttgtgttattattttttgtgaaattatagtgaagaaacgccgtccctaaatttccgacaccgatcaaaatgacgttcgtcgtttcatcctgatccagtgtttttctgaaaaatgacagcaggtaatccacattatagccgtatccttttttgccgagcgccccgaaataggaaaaatcccggcggatcgtggccgaatcgacttttaccgcatcgctcagttcagccgatgaaacgcgctgctttcctgacgcgtgtaaattctttaaaaagcgataataaagcggcagccgttttgccgtcgcctgtggaatttttgattgatccttgttcatgattggtcctccactttatactcagatgcatctcttttaaaatcaccgtttttgcctcctgttttttccatgaggcaggtcgggccgatgaccattcctttatccagcgccttgcacatgtcatacacggtcaaagcgcagactgaagcggaagttagcgcttccatttccacacctgtactccctttcgtttttacgcttgcctgtatatgaagaacggcttcggaatccttttcctcccagccgaatgaaatgtcgacgctgcttaaagaaagcgggtggcacatcgggataatcgctgacgtctgctttgcggccataattcctgccacctgtgcgacagccagcacgtctccttttccgatctcgcggtttttgattctgctgtacacgtcatgcttcatgtgtacgctggatatcgcagcggcagtacggactgttgaagatttatcgcttatatccaccatgcgggcacggccttcttcattaaaatgagaaaatccattcatatttaaactctccttacttctgatcatacactattttctccctgatgtcttatcctataatgttccaattctgatgtattgtttgctgacagcaggttgataagctacacttaacttattataacagaggtgaaataatatgatgatcttacaaattaatcagctatccaaatcttttggcgctgatcctattttaaacaatataaagcttgaagtcagatctcgggatcgcatcgccatagtaggcagaaacggagccggcaaatcaactctccttaaaattatcgcaggtcacctttcatatgaaaagggtgaattaatcaaaccgaaagaattaacgatgggatatcttgcccagcacacaggcttggaatcccagcttaccataaaagaagaactgctgagcgtttttgatttcctgaaagcaatggaaaaagagatgcgctctattgaagaaaagatggccacggccgcccccgcggagcttgaaacgctgatgaaaacctatgacaggcttcagcaggatttcaaggataaaggcggctatcaatatgaagcggacgtccgatctatccttcacggactcggcttcggaaaatttgacgattccgtgaaagtgcaaagcctgagcggcggtcagaaaacaaggcttgcgctcggaaaactgctgctgacccagcctgatctgcttattctggatgaaccgacgaaccatctcgacatcgatacgcttacatggcttgagcattatttacagggatattcaggcgcaatcctgatcgtttcccacgacagatactttcttgataaagtcgtcagccaagtgtacgaggtctcacggacagaaagcaaaaaatacctcggcaactacagcgcctatttagaacaaaaagctgagcagtatgagaaagacctgaagctgtatgaaaaacagcaggacgaaatcgccaagcttcaagattttgtcgaccgcaatctggccagagcttctacaacgaaaagagcccaaagcagacgaaaacagcttgaacggatggacgtcatggcaaagccgctcggggatgagaaatccgccgccttccgttttgacattacaaaacagagcggaaacgacgtcctgcgcgtacaggatctttccatcagctatgacggccagccgccgctcttgaaaaacctgaccttcggcattacaagaggcgaaagcgccgccctcgtcggaccgaacggaatcggcaaatcaaccttgctgaaaacgattatgaatacaatcagtccggaatccgggtcgatcacgtacggttccaatgtcacaatcggctattacgatcaggagcaggctgaactgacatcgtccaaacgcgtgctggacgagctgtgggatgaatatccggacatgccggaaaaagaaatcagaacatgcctcggcaactttctgttcagcggagacgatgtcctgaaaccggtccgttcgttaagcggcggggagaaagcaagagtcgcgcttgccaagctgatgcttcaaaaagcaaactttctcatccttgatgagccgacaaaccaccttgacctggacagtaaagaggtgctggaaaacgccctgatcgactacccgggaacactgttatttgtatcgcatgaccgctactttattaacaggatcgccacaagagtgctggagctgtcacctgatcatgcagaagaatatttgggagactatgattattacaccgagaaaaaagcacagcagctggaactggaagaaatgaagcggcaggaaaaggagcagactcagcctgccggcaaggtcaaacaggatacgaaaagaacttacgaggaagaaaaagaatggaagaagaaagaacggcagcgcctgagacgcattgaagaaatcgaagcggccgtctcatccgccgaagagaaaatcagtgccaatgaggagctgctgtgcgatcctgacgtgtatcaggatcatgaaaaagtacagaccattcacgcggagaatgaagcccagaatcaaaagctcgaaaacttattagcagaatgggaggaactctcctcagaagaatagaaaaagtcaagcacctctttaaggggtgcttttttatccacagctatcctccttgtcagccatttaagtaagcgttttatacacactatccacaaaattttctgactttatccactttactaacaactttcagtcccttatccagactggatttctgaatatattcacaatcctgtggatatgttagaattatctgttaataagtaaaaaaaagcctcacgttttacaacgtgagacgatcaaaggatgttaattccaaaccgggctgtccgttcatatcgtacgagccccggatccccttttcaaaagcaacggttccggcagccgcaatcatcgctgcattgtccgtgcataaagaaagcggcgggatgacaagctcgggatctcccgaatggctgaattcctgctgcagtgcggctctcaaccctttgttagcggctacgccccctgcaagcagcacttgtttaaccctgtattctttcgcggccttagaggtttttgccgtcagtacatcaatgacactctgctgaaagcttgcggcaagatcctccggaggaatcacctcatttttttgcgaggcgttatgaagcgtgttaatcacggctgatttcaggccgctgaagctgaaattgtaagacccttcttccagccacgcacgcggaagcggaatggaatccgttcccgcagcagccagcttatcaatctgcggccctcccggataaggaagccccatcgttcttgccactttgtcgtaagcttcgcctgcggcatcatccagcgtttcaccgataacctcgaatgaaccgtgttctttcatataaaccaattccgtatgtccgcctgacacaaccaaagcaagcgccgggaactgaagctctcctatcagcctgtttgcataaatatggcccgcaatgtgatggacgccgactaacggtatttgatgggcaaagcttaacgcctttgccgcattgaccccgattaacagggctccgacaagtccgggtccttccgttacggcaatcgcatcaagatcatcaaagcccatctccgcctttgaaagagcttcctcaatcacaagggtaatctgctccacatgatgtctggacgctatttcaggcacgaccccgccgaaacgtttatggctttcaatttgagaagcgacaacgtttgaaatgatgtcttttccgttttttacgactgaggccgcagtttcatcacagcttgtttcgattcctaatacataaatatcttgtttttcactcatgtaatgtcacccacattaataacgcatcttccccgttatctgtatagtattgttttctgattcctccggcctgaagaccgaatttcttatataaggattgggcgggatgatttgagaccctgacttcgagagagagccttcttgcctttttttctctgcacaattctatcgcagagcgaaacagcgcttctcccaacgattggccccgatattccggcttaatggctatgttcgtaatctgcgcgtcatctataataatccagattccgcaataccccgccagacagccgtccttttcaatgacaaggtagtgggcatacggattttccaaaagctcatgataaaatgaatccttcgtccacggagaagtaaaggatgctgtttcaatttcataaatttgatcaatatcttccggccgcatgcttcgaatcgccgttttcgttttcatccctatcaccctatttttgagattccatccatttcgcttcagcctctgccagacgcaaataatccggaacaaggctgtggacatccgcttcttctttttccaagcctaaaaacgccagctctgacggccgcggattatgctgtgcagccgttcctatcactgcttgatttgtcagcccatgcagaatggtttcttcatgaatggctgtatcatgccctaaaaataaaaccggagacgctttttctttcagcatgtcgagccaatcagtcaaaagcacattctgatcaggaagaacggattgtaagcggccgtcctgatattcataaagtcccgtatatacctgtccgcgccgggcatcaaataacgggcagatcagtccttgaaagtgccgtccgttagccgccagcacctccaggctcgagacagcggaaaccggaagcttcagcgaccatgccaatgtttttgccagcgtcacaccgattctgacacctgtgtacgatccaggtcctttcgccaccgctattttcgtaaggtcctgcggtgttaggccgcaatccttcagcaatgaattgacagcaggcatcgcccgcacggaatgattcttttttaaatatgtaatatactccgccatcaccgttttctctcgaacgagcgcggcacccagcgtgtaatttgacgtatcaattgccagtattgtcatgtttatttatctcctcacaaagcgtttcataccgtgttccgcaagccgtaaaggtaatgtcccttgcctcatcaccggctctcttgatgacgatctgcagccgttcagcaggcagctgatcctgaattaaatgagcccattcaattaaacagacgccttgtccctcaaaatattcttcaagccctaagtcttcgctttcatcctccatacgatacacgtccatatgatatagaggaatcgaaccgtcatggtattcttttataattgtaaaagtcgggctgtttaccactctcgtgattcccagtccttcggcaaaaccctttgtaaaagtcgtttttcccgcgcctaagtcgccttccagtgtcaaaatgtctcccggctttgccaaagaagcggcaagcttggctacggctttcgtttcttcggggtttttcgttctccattgtaatgtcttcaaagtgagtcacccgtcttatttaaaatgattgtatccttttttctcaaggacgatttgtctctgatcattggctgtcaaaagaacacatgcttccttccgttcagataccgcccctatcttcgcaatcggaatgcccgattgagtgcagtaatcaagcagagaggtccactcttgctgagaaaccgttccaaccaattcaaaatcttcaccgccgaataacacccatttcttccactcagaatctgcctcaggcaaatccggatgcaccggcagaagttgttcttcaatttctatcgtaactgaacttgccgcagctatttcatgcagctcactggccaatccgtcactgatatcattcagagccgcgcgctgaagctgagagcagaagcggccgacttgaactctcggaacgggccgtttatgtttttggataaaataatcactcgtatgaaaagcagaaggatgtgtttctcccaacaaaagagacagtcctgctgcggacgagccgatatcccccgtaacaaacacaacatccccgggtcttgccgagcttcgcagacaagcgcaatccttctcaacttctccgatgacagtaacggtaattacggcttgaccggaagcggagacggtatctcccccgatcaaatccatttgatatagtttcgccagttccgccattccttcatacattgcctggacgtcagctttctgccagcaagaaggaaccgctagagacaccaaataaaacttcggaatgcctcccatcgccgccacgtcactaatgttaacagcaagcgccttataaccgatatcatgaggagaggaatactctaatttaaaatggacattctccaccattgtatcaaggcagacaatttgctgcatgtggggtgacgctgtataaaccgcaccatcatcaccgatccctacatcgacggaaggatgataatgcgaatgcggtgtaatactgtgaatcaaatcaaactcatccatatatctcccgtcttcctttctgacgctcttgtgaaatacagctctttctagtgtatcggattatgtttcaatatccaagactttaacgatataaaagaaagcttggttagataccaagctgccagcattaaaagaaaacacaaaaaaaacgaaaacatgatcgtttcgtttacaataaaaatggcggtccggacgggactcgaacccgcgacctcctgcgtgacaggcaggcattctaaccaactgaactaccggaccatttaatttttggttgcgggggcaggatttgaacctgcgaccttcgggttatgagcccgacgagctaccgaactgctccaccccgcgatgataaaattttagaaaagcttggcggcgtcctactctcacagggggaaacccccgactaccatcggcgctgaagagcttaacttccgtgttcggcatgggaacgggtgtgacctcttcgctatcgccaccaaaccattgagagtgttctctcaaaactagataacagtaagcatacattcaaattggttaagtcctcgatcgattagtatctgtcagctccatgtgtcgccacacttccacctcagacctatcaacctgatcatctttcagggatcttacttccttgcggaatgggaaatctcatcttgaggggggcttcatgcttagatgctttcagcacttatcccgtccgcacatagctacccagcgatgcccttggcagaacaactggtacaccagcggtgcgtccatcccggtcctctcgtactaaggacagctcctctcaaatttcctgcgcccgcgacggatagggaccgaactgtctcacgacgttctgaacccagctcgcgtaccgctttaatgggcgaacagcccaacccttgggaccgactacagccccaggatgcgatgagccgacatcgaggtgccaaacctccccgtcgatgtggactcttgggggagataagcctgttatccccggggtagcttttatccgttgagcgatggcccttccatgcggaaccaccggatcactaagcccgactttcgtccctgctcgacttgtaggtctcgcagtcaagctcccttgtgcctttacactctgcgaatgatttccaaccattctgagggaacctttgggcgcctccgttaccttttaggaggcgaccgccccagtcaaactgcccacctgacactgtctccccgcccgataagggcggcgggttagaaggtcaatacagccagggtagtatcccaccgatgcctccaccgaagctggcgctccggtttccaaggctcctacctatcctgtacaagctgtaccaacattcaatatcaggctgcagtaaagctccacggggtctttccgtcctgtcgcgggtaacctgcatcttcacaggtactataatttcaccgagtctctcgttgagacagtgcccagatcgttgcgcctttcgtgcgggtcggaacttacccgacaaggaatttcgctaccttaggaccgttatagttacggccgccgtttactggggcttcaattcgcaccttcgcttacgctaagcgctcctcttaaccttccagcaccgggcaggcgtcagcccctatacttcgccttacggcttcgcagagacctgtgtttttgctaaacagtcgcctgggcctattcactgcggctctctcgggcttgcaccctaacagagcaccccttctcccgaagttacggggtcattttgccgagttccttaacgagagttctctcgatcaccttaggattctctcctcgcctacctgtgtcggtttgcggtacgggcacctctcacctcgctagaggcttttcttggcagtgtggaatcaggaacttcgctactataattcgctcgccatcacagctcagccttcacgggaaacggatttgcctatttcccagcctaactgcttggacgcggatatccaataccgcgcttaccctatcctcctgcgtccccccattgctcaaatggtgaggaggtggtacaggaatatcaacctgttatccatcgcctacgcctttcggcctcggcttaggtcccgactaaccctgagcggacgagccttcctcaggaaaccttaggcattcggtggaggggattctcacccctctttcgctactcataccggcattctcacttctaagcgctccacaagtccttccggtcttgcttcacagcccttagaacgctctcctaccactgttcgaagaacagtccgcagcttcggtgatacgtttagccccggtacattttcggcgcagagtcactcgaccagtgagctattacgcactctttaaatggtggctgcttctaagccaacatcctggttgtctaagcaactccacatccttttccacttaacgtatactttgggaccttagctggcggtctgggctgtttccctttcgactacggatcttatcactcgcagtctgactcccaaggataagtcatcggcattcggagtttgactgaattcggtaacccggtaggggcccctagtccaatcagtgctctacctccgagactcttaccttgaggctagccctaaagctatttcggagagaaccagctatctccaggttcgattggcatttcacccctacccacacctcatccccgcacttttcaacgtgcgtgggttcgggcctccattcagtgttacctgaacttcaccctggacatgggtagatcacctggtttcgggtctacgaccacgtactcaattcgccctattcagactcgctttcgctgcggctccgcatcttctgcttaaccttgcacgggatcgtaactcgccggttcattctacaaaaggcacgccatcacccgttaacgggctctgactacttgtaggcacacggtttcaggatctctttcactccccttccggggtgcttttcacctttccctcacggtactggttcactatcggtcactagggagtatttagccttgggagatggtcctcccggattccgacggaatttcacgtgttccgccgtactcaggatccactcaggagagaacgaagttttgactacagggctgttacctcctatggcgggcctttccagacctcttcatctacctcgttcctttgtaactccgtacagagtgtcctacaaccccaagaggcaagcctcttggtttgggctggtcccgtttcgctcgccgctactcagggaatcgcatttgctttctcttcctccgggtacttagatgtttcagttccccgggtctgccttctcatatcctatgtattcagatatggataccactccattacgagtggtgggtttccccattcggaaatctccggatcaaagcttgcttacagctccccgaagcatatcggtgttcgtcccgtccttcatcggctcctagtgccaaggcatccaccgtgcgccctttctaacttaaccgttaaaaagaatcactacgtgatatcttgcattactaattgaatgtgaattacttctgttatctagttttcaaagaacaatatctcgaagaatcgaatgatccttcaaaactaaacaagacagggaacgttctgtttataagacccaaggtcttatattccgttaaaatccttagaaaggaggtgatccagccgcaccttccgatacggctaccttgttacgacttcaccccaatcatctgtcccaccttcggcggctggctccataaaggttacctcaccgacttcgggtgttacaaactctcgtggtgtgacgggcggtgtgtacaaggcccgggaacgtattcaccgcggcatgctgatccgcgattactagcgattccagcttcacgcagtcgagttgcagactgcgatccgaactgagaacagatttgtgggattggcttaacctcgcggtttcgctgccctttgttctgtccattgtagcacgtgtgtagcccaggtcataaggggcatgatgatttgacgtcatccccaccttcctccggtttgtcaccggcagtcaccttagagtgcccaactgaatgctggcaactaagatcaagggttgcgctcgttgcgggacttaacccaacatctcacgacacgagctgacgacaaccatgcaccacctgtcactctgcccccgaaggggacgtcctatctctaggattgtcagaggatgtcaagacctggtaaggttcttcgcgttgcttcgaattaaaccacatgctccaccgcttgtgcgggcccccgtcaattcctttgagtttcagtcttgcgaccgtactccccaggcggagtgcttaatgcgttagctgcagcactaaggggcggaaaccccctaacacttagcactcatcgtttacggcgtggactaccagggtatctaatcctgttcgctccccacgctttcgctcctcagcgtcagttacagaccagagagtcgccttcgccactggtgttcctccacatctctacgcatttcaccgctacacgtggaattccactctcctcttctgcactcaagttccccagtttccaatgaccctccccggttgagccgggggctttcacatcagacttaagaaaccgcctgcgagccctttacgcccaataattccggacaacgcttgccacctacgtattaccgcggctgctggcacgtagttagccgtggctttctggttaggtaccgtcaaggtgccgccctatttgaacggcacttgttcttccctaacaacagagctttacgatccgaaaaccttcatcactcacgcggcgttgctccgtcagactttcgtccattgcggaagattccctactgctgcctcccgtaggagtctgggccgtgtctcagtcccagtgtggccgatcaccctctcaggtcggctacgcatcgtcgccttggtgagccgttacctcaccaactagctaatgcgccgcgggtccatctgtaagtggtagccgaagccaccttttatgtctgaaccatgcggttcagacaaccatccggtattagccccggtttcccggagttatcccagtcttacaggcaggttacccacgtgttactcacccgtccgccgctaacatcagggagcaagctcccatctgtccgctcgacttgcatgtattaggcacgccgccagcgttcgtcctgagccaggatcaaactctccgataaagtagtttgactgactacgcacatcgctgtgcgatttatttaaaactttgaattaacaggtacgttttgtcttgtttagttttcaaagatcattataatggagcgggtgatgagaatcgaactcacgacatcagcttggaaggctgaggttttaccactaaactacacccgcatttgaattggcgcgcccgagaggagtcgaacccctaaccttttgatccgtagtcaaacgctctatccaattgagctacgggcgcttatcaggcgacttaactatcatactaccaatcagttatgatgtcaagtgttattttatttcttttcgaagtcttttttctcgacctcatttattatacacgctttcgagaatttgtaaagtcttttttaaaaagatcattttctcatttgtcgttatcgctttgttcatcagcgacgtttaataatataccacgcactttaaattaggtcaacacttttacgaaactttttttccgcttattattcccttctatataataaataaaaagcaggattcccaggaaccccgcgtctattcagattacccgctcacctcggcttctgcgctattacgatctgttttttcataggtacggaagttttgttcaagctgttcgagcgaaagacctttcgtttccggaaggaaccttttcacaaatataacggacgctatccctaacaggacaaaaatgaagaaggttgcagacaatccgatgtttgcgagcatgaccggaaaagttaaaccaacaatgaagttcacgatccagaggcagaagacagtcacccccataccaagcccccgcaatcgcagcgggaatatctccgacagcatcagccaggtcaccggagagacagccccctgctgaaacgcaaggaaagtgactgttaatgaaagaaccacataaggaagagcaggcgatcctttcagcacgacagacagaactccgatcaaaagcagcaccgcagtcgttccgatcagccccgtcatcagcatcgggcggcggccgactttgccgagaagccatattcccacaaaagtcgcgagcaccgaaatcacaccgttagcgatattgccgattaatgcggcttttgtctcaaaaccggcatcttttaaaatttgagttccataatacataattgaattcacgccggtgagctgctgcactaccgcaattccgatcccgataaacacaatgcggcgcacccacggaacggcaagatccttaaaggtcgcctgctccatctgagcttccttatgaaaggcagattcaatctcagcgagctcagacttcgctttctcttcattccttattcgccggagaacgtgcaaagcatcttcttttcttcctttagaaaccagccagcgcggactttcaggaactttcagcataccgaaaaacaagaataccgccggaagggccgcgataacgagcatataacgccaagcgtgagaggtatcaccaagcacattgccgatgatagcattacacgtgaaggcaagcagctggcccgttacaatcatcaattcattttgggtaaccattctccctcggctttccgccggcgacatttcagccaaatatgccggaacggttacggatgctcccccgacggcaagccccagcagaaaacgggagatgatcataaccgatacgttaggcgccagtgtacatccaagcgtcgctataaagaacaaaacggcaaggataaggatatttttacgtctgccgttatagtccgacaatctccctccgaaaaccgcgccgatcgcagcgcccaagagcagggagctcgccaccatcccttcagtcaaagcggtaagattaagctggtcagcttccgccataaacggcagcgccccattaatcacaccggtatcgtagccgaaaagaagccccccgaatgtcgatactaaaatgatggttctcaaaaatgaatgctggctgctatttttattcatcttcaaatcctcctagtttttacacagagataatatcggaatattcagttatcaatatttacacctctaacgtctgcatacaaggtctgaccgtccaaaacagttatataagaagaaaatgttccgaaagcgttatcatttatagtgattattcgctctccccctctcgtcatattgttattttatagttactttgtagtgaagttataatgatattattggtacttatgttaatatcataattttaaaagcgctttcagtcaataaatatttcagaaaattttataactcacctttatatcacctatatataatcaattttcgttttatatcaatttatttccataatatactcaattaattacccctattataatcaataattgattacatattgaaaacccccaactgctgattgggggtttttgttttattcttcgtttattgtaacaatcgttctccctctcgcttctccttttaaaagggcaggaagcgtatccggcagctcttcaagtgtaatttccttttgaataaaggcctccagatctgcaggcttgaagtcatcagctaaacgctgccatgttttctttcttgtctccatcggacagaatacggaatcaattcccaagagactgacgccgcgcaatataaacggaaagactgtagccgggagtttcgttcccgctgtcagtccgctcacagcaactgatccgccgtactgaatctgactgagaactgaagcaagcggctcacctccgaccggatcgacggccgctgcccatttttgtttttgcattggttttaacgtgccgttatacacttcgtcgcggtgaatgaccgtctttgctccgaggctcttcaaatacccgctttcttcttcttttcccgtactggcctcgacctcataacctaaggttgaaagaatggagacggcaaagcttccgacgccccctgtcgctcccgtcaccagcacctttcctttttcaggagcggcatggttttcttcaagacgctggacggacaatgcggcagtgaagccggcggttccgatcgtcatggcttctttaagtgtcagaccttcaggcagcggcacgatccaatctgccggaatgcgggccagcccgctatagccgccaaaatgggaaacgcctatgccgtagcttgtcgcaatgactttgtccccttctttaaaacgggcgtcatctgaagaaacgacgattcccgctaaatcaattcccggcacgaaaggatacgaggttacgatcttgccgtcaggaatggcagccaagctgtctttataattcacccctgagtagcaaaccttaatcagcacttcaccctcgggaaggtcctgaaccgccagctcccgtacgctgactgaaaaccggtcttcacgctgatcgactactaacgctttaaattgatctgtcatcactacgtctccttaaaatgaattgaatggctttggaaaagcataaaataagtttgatttgttttcaaatgtcctgccctgtgtagtatgatcaaaagtaaaaacagcgaaagagtggttacgcatcatgtctgataaacaaaacaaagataacaaaaacaacaacagcaatcagccattaccggacattattcataccgccgttttcaaggcgccgatacaagttgtctgggatacggtctctacggcggacggcctgtctctctggtttatgccgaatgatttcacgcctcaagaagacagtgagtttcagctggaatctccgttcggtccgtctccgtgcaagctgctggatattgaagcgccgtaccgcctttctttttcgtgggatacggaaggctggatcgtctcttttgtcttaaaggaaacggaaagcggagatacggaattcactctcattcacggcggatggaaagagccggaagccgtcatcaataaagtcaatcggaaaagctccgagattcacagtacgatggatcaaggatggaacgggcttgtcaacacgaaacttcgcggggcggttgaggcttaacacaaaaggacggacacgctttccgtcctttttttgatgccgatacataaaaactgactttgcaaagacactaacagaagaaccgaaaacttctttcagggggcgctgtttatgtattattacaaagaagagctgatcaatatcattaaaccggacaagccggacccggccgcggccaaggtgcttcaggaaattttaggcgggcattacggggaaatgcggacgatgatgcaatactttttccaaagctctaatttcagaggaaaagaaaagcagttccgcgacctgcttcgcggcgtatttttagaagaaattgcacacgttgagctcgtccagcatacgattaatgcgctgctggatgaaagcggcgctgagggcgccggaaatcaggcagcagatcaggcgccgctagacgaagcggttaaacacgccaatccgcaccattatattatcggggcgcaaagttctcttcctgccgatgcaagcggcaatccatggaacgggtcttgggtatacaaccacgggaatctgatttccgatctattggacaatgtcgtgctggaatcaaccggcgtgctgcaaaagacgcgcatttatgaaatgagctcaaaccagacgttcagagaaacactcggttttctgatcgtccgtgacaacgcccatcaaaatgcatttacaaaagcgctggaaacactgggtgtcgaatggggcaaattatttcccgtgccgaattatgatattgaaaaatacccggaatgccggaaattcgttgaaatgggttatcataatacccaatttaatttcagactggatccgacacggatcggagaaattctgcagggaacgacgccgagccgaaacggcggcgaattaagtgtgtcagagcctcctaaaggtttccccgtgccggaacttcccgagcttccgaatgagcacagccccggactgaaagatatgaacttgtaacaaaaaacgcctgtttcgggcgttttttgtttttctgaatatgaggtttgaatgtgttcaaaacggggaatataagccgggagatcttgccatacggccgtgattttgatgtgagcacatttctgtacatacttcgtttcgaaagttgtcctaattttccagccggccggctgggtatgtttgaatgataatgggaattatgtaaagagaacaatgtcttttttaaggaggcagcgaatgtctaagcaaggaaacttccagaaaactatgtcactttttgatcttattttaatcggcatgggagccatattcggttcggcatggctgtttgccgtcagtaacgtcgcctctaaagcgggcccgtcaggcgttttttcctggctgatcggcgggggaatcatcttattgatcggcttggtttatgcggaactgggcgccgcgctgccgcggaccgggggaattatccggtatcccgtatattcacacggacacctggtcggatatttaatttcctttgtcaccattgtggcatacacgagtcttatttctatagaagtaacggcggtccgccaatacgtggcgtattggtttcccggtttgaccgtaaaaggctctgattctccgacaattgccggatggatattgcaatttgcgctgctctgcctgttcttcctcctcaattactggagtgtcaaaacctttgcgaaagcaaacttcattatttcgatttttaaatatgtcgtaccgattacggtaattgttgtactgatttttcattttcacccgggcaatatgaccgttcacggattcgcgccttttggtttcaccggaattcaggccgcgatttccacaggcggcgtcatgtttgcataccttgggctgcatccgattgtggctgtcgcgagtgaagtgcagaatccgaagcggaacattccgattgcattgattgtttgtattatcgtttctactattatttataccgtgctgcagctcacttttatcggggcgatcccgggggataccctgaagcacggatggccggctatcgggactgaattctcccttccgttcaaagatatcgccgtcttgctcggtttggggtggctggcgacattggtcattttagatgcgattttatcaccgggcggtaacggaaatatctttatgaatacgacttcacgtctcgtctatgcctgggccagaaacggaacattattcagcattttttctaaagtcaataaagaaaccgggacaccgcgtgcctccctttggctttcgttcggtctggctgttttttggacgcttccgttcccttcttggaacgctcttgttaacgtatgctccgtcgcattgattctgtcttatgcgattgcgccgatttcttctgcggcgctgagagtcaacgcaaagaacattaacagaccgttttatttaaaagggatgagcatcatcgggccgctgtcgtttatttttacctcttatattgtatattggtccggatggcgcaccgtatcctggcttctcggttctcaaattgtcatgtttctgatctatctctgtttcagtaaatatgctcccaaagatgatgtcagcatacgccagcagctgaaatcagcatggtggatcgtcggcttttatgtcatgatgctgattttctcctatctcggctcgttcggccacggattgggcattatcagcaatccgcttgacctgattctgatcgccatcggttcgctcggtatttattactgggcaaaatatacaggtctgccgaaggctatgatcgacagtgataaatgacgaatgccggaaagaagtatggtcttctttccggtatttttatgttaagggatgacaaaaaagcgaacatgcgataaaatgaatgacagtcattcataaaaggaggaacccctctattggcaaaacaaagctcgggaaaatacgaaaagatcctgcaagccgcgattgaagtcatttctgaaaaaggattagacaaagcatccatttcagaaatcgtcaaaaaagccggaacggcccaaggtacgttttacttatatttttcttctaaaaacgcactgatatccgcgattgcagaaaacctgctcgacactacgctggacagaataaaagggaaaacggacggttctgaagatttttggacgttgctggacattttggtagatgagacatttcacatcacccggcttcataaagatattatcgttctctgttattccggtcttgccatcgatcattcaatggagaaatgggaagccatttatcagccttattattcctggctggaaggcatgatcaatacggccattgaacagggtgaggtcatcagcggcattcatgtcagatggacggccagaacgattatcaacgttgtcgagaacgcggctgaacggttttatatcggctgtgaacaggatgtcgatctcgaagtatataaaaaagaaatattcagctttctcaaaagaagcttgcagaaatgattggcggagaccgatcatttttgaccgccgtaaaaatgactgacattcattcataactgaggtgactgtatcatgtattggctgcttgtattgatagccggattgttagaagtagtttgggcgtccgccctgaagcatgcggattcgctctttgattggattggtattttccttttgattgccgtcagctttctgatgctgatccgctcttataaaaaaattccgatggctgccgcatataccgtttttgtcggaataggcaccgtcggcacatatgtaacgggcgtcattttaggcgaatcgttttcaatcggacaaatattctttttggctttgctgttgtccggcattttaggaatgaaggtatttacgaaagaaactgaaacaaggggtgaacattaatggcatggctgctgttatttattgccggagcggaggaagttgtagcggccgttgccatgaaacatattgacggttttaaaaaaaagtggccgctgattgtcatggtaacaggctttatgctttcattcttttgcctttccggagcgatgcaggttcttcccacaggtgtcgcgtatgcggcttggaccggcatgggaagcatcggcgtttcggccgtaggcatactttggtttaaagaaaaattcaatctgtcacaattggtgtctctggggcttatcctcatcggtgtcatcggcttaaaactgacagcgtaacggcctgagacagctttttaaataaaaaacaaaggaccctaaacgggtcctttgtttttttatgctgttttgatctgttccgcttttcccgctccgactccgaaaatgaaaatcagaacagagactgcgatcagcatgaataacggaaccgtccagccgtgcgtgatgtcatgcagcaaaccgaatacaagcggcccgaacgcggcaagcaggtatccgaatgactgggccatgccggaaagcgccgcggcttcatgaacatgccgggtccgcaggctgaagaacatcatcgccagactgaacgcacagcctcccgcaattccgatcaaaatgacccatagcggagtgagagccgggcttccgaaaagaacgccggcaatgccgataaggaaaaataaagccgtcagtccggcgagtgcgcgctgatttttcattttagcggcagcgatcggcacgataaaagtaatcggcaggactgagaattgcattaatgaaagcatccatcccgccttacttgagctgagtccattctgctgaagaatttccggcagccaagcgatgacggtgtaaaaaataagggattgcagccccatgaacatcgttaccttccaagccagcggagaccgcatcagactgttttttttctctccgtttgtcccagtcgtgcggacgggcagttcgcgtcctcgcatttgcggaatccacatgacgaacgcaataaaagaaaggatagcccagcagccgagcgcgcctttccagcctacccccgctgaagaggcgatcggcacgctgatgccggatgcaatcgcgccgcacagattcatagaaaccgagtagacgccggtcatgatgcctaaatttccgggaaacttatgtttaatgagactcggcagcaggacgttgcatacggcgatcgacaatcccaacaggatcgttccgaaaaagagagtgccgattccggcgatggagcgcagcagagttccggctgtcaggacaattaatgatgacagtaagacaatctcggtcccgaagcgccgggacaataaaggaacaaacggcgacagacatgcaaaggccaaaagcggcactgtcgtaatggtgccggcagccgcattggtcatgccgaggctgtcccgaattgaggaaacgagcggtccgaccgatgtcagaggcgctctgaggttggcccctatcaatatgactccgatgaccagcaatatcagttttttacgctgacttgcttgcagaacttgatgttcgtctttaattttcatgttcatcctccatgtgtattgtatctttaaatactgtgatgtattggttgacggcctccatggcctgatccggtttctgtccgataatcgcggcggcaagctgggtgtggatccggatagcaggggtgatttccaacaggttatggactgacgcacaaagcgcctccgtcatatgctcgtatagatcagaaagcatattgttatgggccgcctgtacaattgttttgtgcagcttaatgtcggcttcggcataccgttttcgatcttcattttgcaaggccgcttcacattcatccaagcatgccttcagtgctttcaggtcttcgtcattacgcctttccgccgccaatcgtgcagcttctctttcgagtgcgtatctgacttctaatgtttcaagcaaatttgattttttaatatggcggtaaaatgccgcgccgagaacactggatgagctgacatacgtaccgctcccctgccttgtctgcagcaggccggcatgtacgagcgcccgaatggcctcacgcaacgtgtttcggctcacatcaaattgcttcattaaatccagctcagggggaatgcgcgtcccgaccggccatttatccgattgaattaacgattcaatttgcgccaccacttgttctacgagcgacagtctgcttgttttggatatctccatcaaaacacctctgaaatttgtaggatgattctatcattgggtaatataacataaaagaagcgacgatgtaaatcagcggcaacaaaaaaagagtgagtttttctctcactcttcggcgcttttatgaacgttttatattgactgaggtcacgacaaacttgtcatgacggtggcgggaaaatgaatattcaaagggagtgccgttgtccaaaaagcctacatgctcgacttcaagtatcgggtcatccggccggcagccgagatattgctgatccatatcatccgacttgcacgctctgatttttctgtgtgtgcccgcgattttgagctgcaatccccgcgtaatatgatcgtagatggaatggttgagcacctcgtcattaatgccgggtataaggctcgccggcatgtacgttttttcaagaacgtacggttcgccttcaacgattctgagcctcactacataatagacgggagtcttttcatcgatagccaaatgtgcggcgacatcttgagacggaaactgcacttcaaaccggatgaccttgctcttgatatttttgccttttaacaaattgctcaagccgagaatttcgttgctgactacgtgaacgtgctcatcctgcatggctgattgaatgataaatgtgccgtgccctctttttctgaaaagcatcccttcagccgcaagtgtatcaagcgcccgcttcatcgtcatccggctgcacccgaactccgcagcgagcgtcttttcatccgggatcggctgatctatgtcatatacactgcttttaatcctctttctcatttcgttggcgattttttcgtacttattcatcggtttcctccggctgtgtaatgtttgatctgtatagactccttacggttatcataaatttttttccctgcttcatcaatgacgttacagccgccgatattgaaattgaaaggatttcctcgaattttctatggaatctccctcactattatggtagaattttttgcagaaacggacacaaccgaatattgcaatatattgtataacctcaatgatatggtttgagggtgtctaccaggaaccgtaaaatcctgattacaaaaattgtcccgtacactttttgtaatcaggattttttattttctaaaaaataaaaaaaggagtatctgtacatgaatttcaaagtatttctgcttgcagcatctaccatcgcagtcggattggttgaattaattgtgggcggtattcttccgcaaatcgcttccgacttagatatatccattgtcagcgcggggcagctgatcagcgtgtttgcgctcggttacgcggtatccggcccgctgcttttggcagtgacggcaaaggctgaacgaaagcggctttatttaatcgcactgtttattttcttcctaagtaatctggtcgcttatttcagtcccaatttcgccgttcttatggtgtcacgggtgctcgcttccatgagcacagggctgattgtcgtcctttctttaacgattgctcctaaaatcgtggcgcctgaatacagagcgcgggcgatcggcatcattttcatggggttcagctccgcaatcgctttaggcgtgcctgtcggcattatcatcagcaatgccttcggatggcgtgttctgttcttgggaatcggcgtattatctctcatttccatgctgattatcagcgtctttttcgaaaaaatacctgctgaaaaaatgattccgtttcgtgagcagatcaagacgatcgggaccgccaaaattgccagcgcacaccttgtcaccttgtttacattggcggggcattacacactctatgcctactttgcgccttttttggaaagaacgcttcatttgagttccgtttgggtcagtgtatgctactttttgttcggtctgtcagcggtatgcggcggcccgttcggaggctggctgtatgaccgtttaggagcatttaaaagcatcatgcttgtgaccgtttctttcgctctgatcctgtttattcttccgctgacaacggtttctttaatcattttcctgcctgcgatggtgatctggggattgctcagctggagccttgcgccggcgcagcaaagctatttaatcaaaattgcgcctgagtcttccgatattcagcaaagcttcaacacgtccgctttgcagatcggcatcgcgctcgggtcagccatcggcggcggcgtgatcggacaaaccggttctgtcacagcaacagcctggtgcggcggtttgattgtcattatcgctgtcgcgttagctgtattctctttaacgagacctgccttgaaaagaaaatccgcataaatgtgagaccgcaaaaaagccaaaggagttccttcggctttggcggtctttttattttgcggcagcaagctcgtcttctgtcacccatttatgattggttactttttggccgccgtcagtcggtgtatagtcgaccatataaacggttgtctttttggctgaatcaataacggcttcggcacccttcatgcctttcatatgggatgcctcgatcacggccttgtcacccggttttaacgttttatcaccggcgcccttcagctcttcctgaatgacccatttgtgatcttcgacgcgctttcctcccgtttccggagtgtaagatacactgtaaaccgttgtatcataagcaccttttacggttccttgcgcatttttcatgcctttcatatgagaagctaaaatcatgacgtcactgccgactttataagtcggattttcggctttctttaaacctttcggcacctcggatgaacctgagtgattcatgtcttcgtgagagtgcgtttctttgtctttcgctttttcgcttcctcctgaagattgaccgttgcatccggcaagcgccagaacggggatcaggagaaacatgctgaataaaaatagtctcgctttcatttcaagaactcctttgcctttttgatttttcattttccctttcgtttcttcggtaaaacaaaaagatggcctgtcatttctcctaattcttcaactctctctttattgccttttatcaggtgaaattgttcacaaaatgtacacattaatagagatgcagtataatttaattatcagataatagggggaactcatcatgaaaacgaaggtttttgcggtggtattgggcgctgttttaatgattgcggggttggttttggcagaagtttcgctttatatggaatacatcacaatggtcggagctatgattttttcttctatatttatgtcagagccgaaaagaaaatttcgcgtcattaaaggggtttgacttttctattaccgccgtcttctcaggacggcggttttgttttgcatgtcagtcagtctatccgcaaagccgtttcttctgtgccgtcctgatataaaacgaaatgcggggcagtttgtgctttatcacctgcaaattcaatttcaagcggcagcgccctgacaaaataacgggtttccgtcattgggaataattcaaatggtgtctgcccgtctattgcaagatacaatcggttttcttttaccgtcaccgatgcatgtgtgtcatcctgaaatgagtaattgccggtaaatctgctgtaaatcgcaggatcgatatctgcttttttctgatccgccggacgtttcggaatcacgtacggctgatcaaataagatgtttacggccgcggcaatcacagcttgttcaaattgatacgattgttccatattgctgagataaatcagtgttttgttctggtcaatataccggatcatcagagttgaataacccggccagcctccgtcgtgactgataaccttccctttttgggcgctgttttgaatcatccagccaaatccgtatccgaattgctcttcttcattccaatagcccggtgtaaacgcttgatctttagactctttgccgatgatttcttccttataaagagcctgatcaaacagatataaatctctaatagtggagttaacggttccgtcaccttgaatcccgtcaagaaagacgacataatcggtttcctcaagttcatccggcagcacatattctccggaatgaacatcatacacatagccatatgcatagtttggaatgttttctttactcagccttctgttataaatccgcgtatcgtgcatacgaagcggatgaaatacggcttgtttcataaattcagcaaaactcatgcctgatacaatttctataataaccgctaacaccgcataccccgtattactgtatagccactccttgcccggcgggaaataagcatccggtttatgctgcttaagcatatcgatcacatcttgattaacggcaattctgtcccggtcccaatgtgttaaaaataactccatatagtccggcaatcctgacgtatgatggagtaaatgccgaatggtaatgcccggataaggaaaatcaggaagccaccgctctatcatatcgtcataacgcagcttccctcgctgctctaaaatgataacgcctaaagctgtaaacggcttcgatactgaggccaattcaaagactgattggtcattcagcatcctctttgttttcagttctgcagcgccgaatgaaccctgatataagatgcggccgttttccgctgccaatacagctccgtttatttcatgtctttcgtctaaagtgctgaaaagctgttcaaaagcttgttttttcttatcgttcatttcacgaacctccatatacaagctgatttactcttttatacgaacagccgctttagaagtttcaatattttcccttcccggaacaccagtcagtaaactgccgttcaggcagccgcggaggtttaatgaaggtcttttattcgcacaacactgtgcaggcttcgaactcaacatgcttctcgtctttttttgcgccggcaatttccatagtcgaaaacatcgcacagatgacggctttgtattcgttcatgacggtttgaatttcaatcagaaaccgttcggatgaagaggcgtattccgttacgtattctttcattttgccgataatatcatctgcctgacggatgaagccggccgcctccaagtcactctcaaactggtttttgttgatcatatgaatatgcatttttcaaggcccctttcagcagcgttttatggttatatccactgtaaaggacaggcttggataaacttttaataaaatatgaacaaaatatgaattggctcatcggcctgaccggcgggctttcggctgtgctccgtttcatttggactacctgaaataatgacttctttactctatgaaaaacagctcatatatgatctaataccagtaaaatgaacgttaggaggcggcctatgtcagcagcaggaaatcggcaaaaattttgggtcatggcgatgcttatagcggtctttgccgtgtttgttttctctttttccgagaatcattcacaaaagaactggcacacggcggttgaccaggcgtcagtgaatgtcttcggccagcagatctttgaaaaagaccgtctggcaaaaacactcaacgcacgtgaggcagaatctcttctgactcttgtgaaacttgcaaatgaagaacatcacatcatctaaaagccattataaaaagcctgtttccctttggcagaggaaacaggctttttccatgtattattgagcatgtttttgttcaataaaccggtcgatccgggccagaacatcctgcatgtccatacattctttaaagctttcattaatggcttgaatgccttgtttgtattttccgttatgcagcacttcttccgcggcaagctttaccttttcagcgctcacttcatctttttgcactgtacagcctgcatccaattcagtcaggcggcgcgcaaccatcggctggtctttatcatgcggaataacgaccagcggcacttgataatgaatgccttcatttacactgttcattccgccatgcgtgacaaacacgtcggcctgctccagcacttcaagctgcggcacgtacggggcgatgataaagttttccggcgcctgtttgattttcgacagatcggctttttccccggcggcaatgactacttttccttcaaaatctgagaacgcgtctatgcacagattgaaaaacgcttccgtgtccccgagcaccgttcccattgagatataaatgactttttcattctttaatgagtcaatcgggaagtcgacgcgcccttttctcttcggaaaactcggaccgataaataaatactcatctccgaatgtctcactttcgggctgaaaatatctgcttgtatagacgacgttcaattcacctgtgttgttcataaattgaaccatgctgtcaggggcgacaccgtatttgtctttcatctcggccaacagctcttcacattccctgtccggctgaaacggcacgcccgattccggatggagcggcagtattttcagacggtcttcattgaacaggaaggatgctgaagaagagatgccgggaatgttgagataatcccgcaccaactctcccgcaccaaatttatcataatagacggcgtcgaattgaatgtcctctgccagccgctgcacaatatgtaaaatctccagtgacgttttgatatgaacctttaaaaatgcaagtatgccggacggactgccgggatcaatgggtgtcattctgagcagatcgctgtgaagatgaactttcgctcctactccttccagtctgcttttgtatttttccgttgagatataatgaacgtgatcgccccgttcgctgaaggcctttgtcatacccaaagtcgggtttacgtgtccttctgcgggaaaattgatcatcagaatatgtttcgccatttttcaaactcctttgccttttttgcgtctcttccatatccatcataaatgacgcggaaaaaatcatgcaaggaacattcgtcaggtctttatgacggttcgatgacatcggcaaaaaaagacaaggcttttcaccttgtctatcgtgatgattcgtctgtttcacccgctttgagcacacctttcagatgttcttcatcatgcttgagatgctccgtcatatattgcacggcttttgttttatcgcccttttttatttcttcaaagactttccggtgctcatgcaggataacctccgcacggtcatctcctttaaaattaagaactctgcaaaaatgaatcagcacattgacatgctcaagcagcatggccagccggctgttgcggctgaaatccacaaggagccgatgaaacgactcgtttaaggaaataatctcagtctctttgacgcctttattgatggcttcttccgtctcccgcagctgtttttcaatgaggtcaatttcactctcagccgcttcatcaataaccagttcgaccgccaatgattcaagtgacattctgatttgataaatctcttcaacatccttaacggacaaagaataaatgacaaagccgtttcgatcgtctgccgtcagaagcccgtccttttcaaggagccgcatggcttctctgaccggcgaccggctgactccgaaatccttcgccagctgagtctcattcagccgttcacccggtttaaaaatcccgtcaaatatcatttttttcaattgggaataaaactgcagataatacgggattggcttatctaatttaaaattatccatctttcctacctcttcatacaatttaggccttattgttaccaagatcatataacagtttatctatggaagcaacattccagagcttgtcagcataacggaggtgccgtaatatggaagtatagttggtcgagggtattccgtaaaccgaaaacaattcattcggaggtgacggaaacatgaagacatactagattgccggcataccgggggacggtgtggggaaagaagtcgttccgcaagcggagcgggtgttgaacgcgatcgccgaattacatggaggcattgcctttgatttcacttcttttccgcggagctgcgagtattatttggagcacgggactatgatgccggatgatggattagaaacgttacagcactttgatgctttgtttttgggagcggtggggaatcaaaaactcgtccccgatcatgtttcgctgtgggggctgcccatcaagatacgccggtaactacatctccgattttgatctgtaaacgtccgggaaggtgagtacagctctgtcggcagcagcatctatcagggtgaagatgaaatcgccattcaatacgcggtcctttcccggcggggtacggaatgagtgatctgttttcgaaccggcagcgttcggctggggttttgacaaagaaatgatacaattttttacagagatagagagagaaaattgtatgtcaaatcgcagcaggggaactgcaaggaaacggtaacccctcctttaattgtggtgaaaaaagaggatacacctacaagacaggtcgattaagatggtctattggcatcttacatccgcaaatatgtctttacacaaaaaagttagagaggtaaaaaatatgaaaaaaatattttacttttttttgatattatatataattatagtattattacttaattctgtatttgacttaagtaatgtattattaactgttttgtttgctatattcgttggtgcattagtgatttatagcattgcgaaacggagtaaaggtgatgagagaaaaaagtgttaaagaaggttactaaattatttatagcggggtgtattctcgctactgtgttgtctgctttcgctccaagttctgaagcagcttgtcgacggacaaatcttgggactcagtgtgataatgatgttcttcttaaaaaaagggtaaaggtttattacacaaaaaatcaggtgaaaaaagtggtttctagatataacagcatggggtctaataaagggcttattctcggttatattattgggttggtacacccttctactggtttaagtgttttaatgtatcaagtaggagctaataatatgattaagccttttaaaactgctaattctaagaaaaagggtttagagatttcttacacggttaccgtttataagtggtcaaatgcatctactaaggtatctggagtaaaatataaatatagataagactaagtaatacataatgagcaggcgatggcctgcttttttttattacaggagaaatgtgcaaaatgaaaaaggaaaactgaagtggaaatcgatctgcatgtcagggagcctgtgtgatgatgcgttcccagagtgagtcaacagtatgcggattgcagggaggattaaggagttgactcactcagtcagcattcaaacaaacttgtttcaatcggcggaaacacgtcacaagcgcgacgaaatcaaacggtattgttcactcgatgccgttctgggatgacatctttaaagaggtcagccgggagtacgccgggatcgagacggattcccagcacatcgatgcactggcggccttctttgtcacgcagcccgaacgctttgatgtcattgtcgcttcgaatctgttcggagatgtgctgacagatatcggcgcggcgattatgggaagcgtcggaatcgctcccgcagccaacatcaatgtaaacggcaaatatccttccatgtttgagcctgttcacggctccgccccggatattgtcggaaaaggaatagccaatcctatcggccaaatatggacggcgaaattaatgctcgattcattcggagaagaggaactgggccatctcctcttacaatctattgaaacggtcacaaacagcggtattctgactcctgatgccggcggaaaacattcaacggaagatgtcacttccgctattatttctcaaatcaagaacagataatacgaaaaaaccgcgggcaggaaaactgcacagcggttttttcgtctcagacgggacggagcgcgcagaaacaggccgattcacctgtgaagcccgcaatacggcctgattgatccttttctacagaaaaaaaccgctgtatatcacaaggagcatccagcatctgtttttccagtaatgcggctttctcttcagtcaggcttgcccgttcacaccagacggtaaattgaaatggtttcaaaaagcagacagcggattcaatccggaagccggctgtctccagaaaacgaagccattctgtttttttccacgcccgaaagtggctctgatcccgtttcttttcaatgtcattataaaaatggtcatattcatccttttcaggtgcggtattgtcaatgagaagcagtctgccgcccggtttgacaacccgaaacgcttcatgaacaaaggctctgacatcgggaaaatgatgcgccgcgattctgcatgtgacgatatcgaaagcagcatcggaaaacggcatcttttcagcatcgcctttttcgaatgacacgttcgtccatccgtttccggttataaatgcttcagcggctgctaacatttcttccgtgaggtcatatgcgataacagagcgtacgagaggagcgagagcgttagccgtatgtccgcctcccgtcgcgatatccagcacgtccatatgcttttcggcaccggaagctgaaatgagatatgccaaatcctctcctgcggcgtatccgggactagtcacatatttcgcggcgtttttagcaaattgccgctgcgcctgctgtttaattgaatcctccattatacttgggcccccttttctttctgcttgctgccttaatcaaaataaacgggttcgtccggatgtttgagatatgcaaacatcttttcaatctgactttccgtattgcgggcttcagatagcggcggcagttccgtttccgcaaaaaagccggccgcgcttgtttccgttccctccctgagccggccgccgatgatctcgcatcggataaacactttgtaaacgtgggcggcggacggcgggtgggaatggcatttcttatccattacagctaacagtttaacgggctttacgtcgattcccgactcctcttttacttctttgacagcggtctcgcccggtgaaatcccgatatcagcccatccgcccggcagcgcccatctgccgtcgcttttctctcttaccattaatatgctctgatctttaaaaactgccgctctgatatcaactttcggagtgggatagcccgtgtcaccggcgaatacgtctttgatgatgcttttgtcgatgccggtatgttgcgccatgatatccacgcttatttttcttatttcttcaaatctctcaatatcatatatgtctttggaataagccagccccgcttgcgccgcggattgaagctgttttgcccattcaagccattttggctccattttttccaccgcccgttatgttaattaaacgaaacccgaattgcaccttgagagtaccccgtttctgctccttgttttctgtttatggcggagcgaatcctgccgggaaatcagaaaaagccattcatttgctgaatggctttttttcattttctatttttctttcatgacgagaacgacgcctgaaacaataagggccgccccgatccagaaggttcctccgatcgtctctcccagcagcagccagccgagcaatgtcccggaaagcggctgaaagaagaaaaacagaccgccgcttgccgcattcagcaattgtaatccgcgattccaaagcatgaacgcgcaggcggttgagatcacacccagatataaaagtccgccccatatctcaggccgggcaagctgagacaaaggaatctcccgaagcgggccctctgtaaacggggtcaggatgacaaatgcgacgcaaatggaatacgttgtgacgacaagcggtgagtaatggccgggaacccgtttcatcagcacggacatcaaagcccatgtcagcgccccagccagaagcgagagaccgccgaactggctcgacatattgagatctccgttccccacaatgagcaatactccgatcgtcgccagccctgtcgatattccttttttcagcgttaaccgttctttcaaaatcagccgggcaaatacaaccataaatgcgggagtggatgccgtaataatcgcacccatctgcgcggttgataatttcgtgccgatttcctgcgtgacgatcgaaatcgtgttgccgatcaatccgatcgcagcgatcagtaataaatcacgtttatgaactttccaggattggcgtgtaaataaactgagaatcaaaagcgaaaaaagcgccaccgcatatctcagccataccagttcaagcggcggaatgaccgctaccactactttaacgacgacatacataccgccccagatactggcggccaatgccaaataaatcgaaccgaacaatgtatttttcaatttgatgcaccctccgttatcatattaggtcacgtcatatgccttaacggagagaagcgcagtcactttcctccattaagggcggagaagtgctgccggtacatcatgttcaaataagggcgctagaaacatatcgtttttcacctcaattgcaatctgatttttctcattatacaaggtttgtcagaagacgtaaacgaacggcggcatcggctttatcgattgcggacttgcagctggattcttgtgatctgattgtcaaacccgtccgccacaacctcatcaagcaaatattcttcatatgcataatcgcccatttccagcccatactcttcaataaactgcatgatgctgcggtaagccgcttccgcttcatcccctatttggtacccgacggcataaagccctttcggcttgatatggaggtcattattctctatgccttcttctgtcttcatataaaaatgggtgtagttgtagaattcttttttcagaatctgctcccgcgcaaacagtccgccgaccggatgcccctgatcgagttcatgtacccgcatatagcggatcaattcggaaatggccgcagtgtattgccgttctggcaaatggagtacgggtcgtcctatcataagtgtctcttcatctaatcgctgcaatgagacggaggagaagtctgtctccaaagcttgttcggtcagcttcacctttgtctgaatcattctttgcaggtgctccagctttttgattttgctttcgatttctgatgatttctcttttaaaagcgtgatgataccctcaggggttttgtctgttaagagcggtttgatctgcttcaagggcacgccgacctccttaaacagaccgataacctggaacagttcgaattgatgataggaatagtatctgtatccgttcgcttttttgatttccggagaaagcaggccgatttcgtcataatggaacagggtttgtttttttacgtggcacagttttgcaaattcacccgttgtgaagtattttctgacgtcttcgctcataatgcctccttgactatacggtaaccatatcctttatgatgatcattgtatccgagagaaggctgattcacaaatggcttacgcaatgaaagctttaccgtctcagaaaaagcagaagaggagtatcaagtatgacgattgaaatcagagcagtcacggaagaaaaccgtgctgatatactggcgcttcatgtaagggaaagccagacttcatttattgaaaccgcggaagagtgcttacaagatgctgaggattgccggcattatcagccggccggtctttatgttaacggggaattagtcggctttgccatgtacggatggtttccggaatatgatgaggaaaatgaaaacggcagagtgtggcttgaccgtttttttattgatgaacgttatcagggacgtggattgggcaggctgttgcttgatgcccttatccgccatctcgttcgaatatatgagtgcagacggatttatttaagtctgtttgaagataacgtgcacgcattgcggctttatcaaaaattcggcttcttattcaatggagagctggactcaaacggggaaaaagtgatggtgaaagagctgtaaaccctctgtataaaagcgattcggcttcttgccaatccctcaaatttgaggtaacataaagataatggacgacggtcgacggacgacgatcgattgttaaaaacctgataaagcggatctgaacatggtgatcaggcatctaaatggaggagaagattgtgcttattatactcgttatgttccttctcgggattattctagggtttatcggcgcggggggagccggttttgtcattgcacttttaactatactgtttcacgtaccgattcatacggctttgggcacctccctcgccggaatggctttcacaagtttatcgggggctttcagccactaccgtgaaggcaatattcagatgaaaatcggcctcatcgtcggcgtttttgcggcattcggttcgtttttcggggcaaggcttacttcccttatccctgcagatttgctgcattacttgacggcgggcatgctgtttttatccgctctgcttattttagtccggttatttattgtaaaagaaacacatgaagattccggacggcaaagcaatctgaacatatgggtgaaagccgttgtactcggtatcatcgcaggaatcttgtccggaacgttcgggatcggctctgcccctttcatccagatcggcttaatgattcttttgcgcttatccatccgccagtcggtcggcaccaccatgcttgtcattatcccgcttgcggtcggcggaggactcggttatgtgacggaaggatttgtcgattatatactgttggtcaaagtgctgatcggcacgatgtgcggcgcatatgtcggagcgaaattcaccaaccacgtgccgaaagtcattctgaaatcagccatctttttaacaccggccatcgccggtctcatgcttttattttaaactgaaacgggaggcggccgcctcccgttttttctgttcttcacctgttttcgaagagctttttcagctttgcttccgtttcggtatgatctaccggcgtatacacactgcagcgcagatcactgttgccctgaacctgaaatgaagtcaggttaaagaccatttttcccgccttcgcgtggcggaactcaattaatacttcgggtgccgagctgacttcgctctcattccacagcgtatgaaattccgaatacgttttctccatttcttctataaactgagaataccacgtatcagctacatactggccgtagtacgttctgaaaatggcgatgaatcctttcacaaagtgctcccagttcacagctaaacttcttaattcttttctggaaaacaatagctctatgagattccgtttttcaggaggaatttgttcaaaatctaaaaacacgtgagccgcggcctgattccatcccacgatatgacagcgcctgtccgagataatggtgggacaataacggagctcctgcaggatttttgaaagcgacgggctgataaccgcttcttcctccgcggcaaacggctgcttcacgccctcctcaatggcaagcgcgtataaataatttctctcatctttgttgagctgcagcgcatcggaaaccgcgtccaatacggctgcggacactttaatgtctctgccctgctccagccacgtataccacgtggtgcttacgcctgctaattgcgcgacctcttctcttcggagcccgggcgttcttctccgtgtgcccatcggcagcccggccatctgcggagaaattttggcccgctgcgtttttaaaaactctgagagcgcctgcaatcttccttctggtatcataccgaatctctcctctcttaccctggtattcattatactaggataatcaacaacttgtaataggataattgcgagttacaataaatacataccgaaggaggaatgaccatgaaaagagttgtgatcaccggaatgggagtgatttcacctctcggcaatgatgtgcatacattttggaaacacctgacggaaggaacatcgggaatttctctcatcgattcgtttgatgtctccggctccaagacaaaaatagccggcaccgtccgtgattttgacgcagaagaaagatggggcagaaaagaagcgagacggcttgaccgtttcagccagtttgctttagcggcagcggaacaggcgcttgaaagctccgggattcagctcgatcagattgaccgtgaacgcctcggcgtgtacgtcggctcgggaatcggcggcatcacgactttgattgataacgttcatactttaaatgaacggggagcgcgaaaagtgagcccgagccttgtccccatgatgatctcaaacgcggccgccgctcaaatcagcatcagattaggcgcgctcggcccctcactttctcccgtcaccgcgtgttccatcggcaatacgtcgatcggggaagcattcaacgccattcggaatgatgacgcagatattatgtttgccgggggagcggaagcggcgattacgaatttgtcattagccagcttcggcaatgcccacgcgctgtcagcgagaaacgaagaccccgccgcggcaagccggccgtttgacgctgatcgcgatgggtttgtcatgagtgaaggcgcgggcatcttagtattggaatcattggatagcgcaatcggcagaaacgccccgatcctctgtgaggtgctcggctacggcgcaagctctgacgcgtatcatatggtggcctcccatccggaagggacgggcgcatacctggcgatgaaaaatgctttgaaaaaggcgaacgtttcagcggaagacattgatgtcgtaagcgcccacgcgacaagcacaaaagccggagatctttctgaaacattggcaatcaaaacattattcggggagcttgcgtatgacattccggttacggccaacaaatcaatgctcggccacatgcttggcgcggcaggcggcgttgaagccatcgctctgacagaaagcctgagacacggcatcatcccgccgacgatcaatctgcagcaccctgattcggcatgtgatttggactatgtgtcagacgggccccgccatcaatcgttaacgatcggcctttccaactcattcggctttggcggacataattcggcgatcgtgctgaagaaatatgaatagcgggcatcaaaaaaaggagtgaatcatttcactccttttttgctttctccggttttgttgttaaggcaaaaaaagcgatggaaccgataacggatgtcgtgaacataattgcccccatcggcacggccgtcgcttcattcatccccacaagcggcgacacgatggaaccgagaagaagcggaagcatgccgagcagtgcgcttgcgcttcccgcgcggtgtccctgcttttccatcgccaatgtaaaggtgcttgtcagcgtcatgccgatcgtaatcatataaataaaaatggaaatcaccagtgccgccagcggtccgtgaatgatcgtcatgacgagcagaacggcagtcgccgtcatcgctgtaatcacgccgattttcagcaggcttttttcgtgaatgatcccgccgaaacggccgatgataaagcttccggtaatgatcgccagaccgtttatgccgaataaaacactgaatacctgaggcgatactccgtaaatatcctgatacacgaaaggcgttccggagacatacgcaaagctcccgccgtgaataaaaccgaccgtcagcgcatagccgataaatgaccgatccttcagcaggcttcccattgtccgcacggaatttccgatggagctcggaatccgcttttccggcggcagggtttctgtcagcttgagcgcaatgatgagaacaagcaaaaacccgataaaggttaaaaacagaaaaatcgtatgccatgatgcaaacggaagcaataaaatcgcgcctcccgtcatcggcgccaccatcggcgcgacggcggtaatgaccatcagcagcgagaaaaatttagaaagttctcttcccgtaaacacatctctgacgattgcacgggataaaacgagtcccgccgaagcggtgaatccttgaagaaaacgggcaatcaccagtgttgaaatgttcggtgcaagcgcgcaaaacagagaaaacaaagcaaataaaaaaatacatagcaataacggttttcttcttcccttcgcgtcacttaacgggccgacaacaacctgtccgattgtcagtccgatcagacaagcggttaaactgagctggacaagcgaagcgcgggcgcttaaatcttcggcgatttcagggaaactcggcagatacatatctatattgagcggccccagtatcgcaagcattccgagaagaaaagccagcgcaagccgctccttaccggtcggattatgcagcatatcgttcccacctttcctttgtcaatctctcaaaacatttgtatattgtatcataattttttctttatttttaaaagttttcaaagggcataaaaaaaaccaagggctgtaacagcccttggttccgggtcacgcggtaaaaggttttacgcgtgtttttctttaaatgcttttgcgtattgatcagccgctataatggcgtccgccacgtcgtcagccgtcacgtcaaaagcggcatgaatcgtttcttcttcaatcgtcgcggcttctgccactttcataatgtcctctttagatgcgtctttcattttgatgtcttcaagtgtgacaggcagccccaagctgatataaaacgcgatataccgctcaatttcctcaagcgaacgtttttccagcgccaattgaacgagcgtgccgaatgccactttttcaccatgggtcaagtgatggatttcaccttcaagcgcggtaaatccgttatgaatggcatgtgccgcagctaagccgccgctttcaaatcccagtccgctcagaagtgtattggcttcaaccaccgcttccaatgcgggcgtaacggctttcgctttcacagactcataagcgagacggccgtatttgaataataccgcttcacatttttccgcgatagcctctccggcgattgtcggaattccgcctgccatcgttttaccgccattggcgatgacactgcgcgcctctatccacgtcgccatcgcatcggcaatccctgatgctaaaaagcgcggcggagcttccgcgacgattttcgtatcgaccagaaccaagtcaggattcttatgataaaaacgatagttttcgaacgcgccttgttcagaatacacgacagacagcccgcttgtcggagcatccgttgaagcggccgtcggcacgataacggtgtagccgtttatttcatctgatacggctttggccgtatcaagcgttttaccgccgccgactccgatgacaatagtcgcccctgctttttctgcgatgccggcaattcttttcatttcttcctgggaggcttcgccgttgaaaaccgcctcttcagaagagatattgcttttctttaattcagccgtcaccttgtggcccgcgatatcccatacggttttgtccgcgatgacgacggctttttcaccaacgccctccagatgtccgccgatcgtttcaatggcgttttttccctgcacgtatttggccggactgataaaaattcgttccaatgtcatcatcccttcttcgttgtctctcattacatttctcttattgatagagcggaaatgaaaactcttctgatataattcctcgttttaacttggtttaaacctcatatacactgcagaaaatcaattttcacggcattgacaagatgtgaaggtgtctatataatcttcgatattgaagctgatcattctttactgaatgaacaaacgagattgtgaatgattcgtcttaaaaattatttagttctgctggataatttttgaggcgtttttgttttatatatatttttgactgcggaggaggtttgcacatgaagaacatttgcaaggatatactgatgattatggccggagcctttcttatcgcggcgtccgtggaatttttcgtcatcccgaatcatttaggggacggcagcaccgtgggaatcgctctcgttttatattatcttttccatatacctgcaagtattacgactctggttgtaaatttgatttttatcgggctggcttataaatttttaacgaaaaaaacgattttatacacgatactcggtacgggaatgacttctgtttttctcagcatcgtcagctttattccgttcggcgtgcacgacatggtgctcgggattgtattcggcgctctgctgatgggagcggggctggcattgatctttatcgctgacggatctaccggcgggaccacgcttttggcgtatttattgaattacacaaagggctttaacatctccaaaagcatgttttatatggattgtgtcatcattttcgcatccgttttagcgatcggaatcaatcatatgctgtatacgtttatattcgtttatctgtgcgccaaaatcgtcgatattgtcattgagggtttccataataaaaaagccctcaccattatgtctgaccaatacgaagaaatcgccaaagccatcacctccgagtacggcaacgcggcgacgattttttacggatacgggtattacggcagcaaagacaagcgcattatctatgttgtcattaaaaagaacgaattgctgaaaatcaaaaaacatgttcaaaaaattgatccgaaatcatttatcgttattcatgaagtaaaagaagctgtcggagggcaattcgggtttacaaacctgcccgccgccgcaaatgaaaaataaccgcctgcagtgtatagctgcaggctttttttattcggctcttccccgctcaaaggttttttacatctttcaatcgaagtagtaaatgaaaccttttttgatggaggaacataaaaaaatgaatatcaaaactgaaaggctcgtcattcggacatttgaaccggaagattggcaggatgtctatgcgtacacctcgaatccgagtgtcatgaaatatataccagagggtgtctttaccgaagaagatgccaggaaattcgttactgaaaacagcggtgaacatgccgggaagtttcccgttttattgaaggatgagaaaacggtcattggccacattgttttttttcagtattttggcgatcatacgtatgaaatcggctgggtgtttcacccggaataccagggcaaaggatatgcttcagaggcggcgcgcgccgtgctggcattcgggtttaacaagatgaaattacaccggatcattgcgacatgtcagccggaaaacatggcttcgcaccgggtgatggaaaagatcgggatgaggcgggaaggcttgtttaaaaaatgcatcccccatgataatgaatggtgggatgaatattattatgccgttttagaagaagagtgggaagcctccgatctggaataaaaaggcttataccctttgcttttacagataagtgtgtgctacactgttcgtaacaaatacgaagggatgatgggtggacaatgattaactaatcttattttgaccgtttgaaatcaaatatttcaaatcagaaaaaataggattagtctgcccattttctatacgatacgagaaagctatgtaaaaatagcttatttgatcacgcacaggtacggctaatccttccaaatcaattgggaggatttttttgtcctccctttaaagcgagggattgacatatgaaagaaatgttaaaaataagcggcatcagttacgaaatcaacagcgttcccctttttgaacagatcagcgcgagtgttcagcaaggcgacatcatcggtgttatcggtaaaaacggcgccggcaaatctttattgctgcaattgatctgcaataaaaaagcgccgtcacaaggacagatccagatgatgcaagatgtgaacatatatatggtggaacaagaaacggaagcttatgattccggccatccggagcctgcggaggcagccttgttagaaaagtggaacgtgcccgcacgcgccttttcgcaattaagcggcggagaaaaattgaaagcccgtcttgccaaaggtttctcctcctcaagcggccttttgttattagatgagccgacgaaccacctcgatcagcacagtttagaaatactgcttaatcagatcaagaattacaaaggcaccattattttcgtttcacatgatcgtgcttttatagatgcggcggcgacaaaaatctgggccatcgaaggaaagaaactcattgaacataaagggaattattcaagctatatggaggtccgcaaacagagaaggctgacacagcagcgggaatatgagaatcagcagcatatgatcagacggattgaagctcaaatgaacgagctgagcgcctggtcaaaaaaagcccacgcccaatcaacgaaaatagaaggctttaaagaatatcaccgcgtaaaagcaaaacgcacggacgcccagattaaatcaaagcagaagcgtcttgaaaaagagcttgaaaaagcgaaagcagaaccggttgaagcggagtatgaagtccgtttttccattgagcaccgcaaaaaagcgggaaagcgttttttagaagtaagtgatgtcacaaagtcatatgaaggccgaacgctttttaaaaacgtgaatttcactgtgatgcacggtgaaaagatcgcgattacaggcccgaacggcagcgggaaaacaacattattgaaggtcatcctcggtcaggaaaaagcgcagggcggcatatggatttctccgtctgcaaacgtcggctatttaacccaggaagtattcgaccttccgcttgataaaacccccgaacagcttttttacaaagaaacgttcgaagcaaggggaaatgttcaatccctcatgaagcatttaggatttaccgcagcgcaatggacggaacccatcggcaagatgagcatgggagagcgggtcaaatgcaagctgatggcgtttattctgggggagaaagatgtgctgattctggatgagccgacaaaccaccttgatctgccgtcacgcgagcagcttgaagacactttggcccgatacgacggaacgctcatcatcgtatcgcatgatcgttactttgtcgaaaagacgacggacatccggcttgatatctcaaacggcagcgtccgaaaacaatggaaagaatctccctccgtcagggatgatgctgaagaactgcgattaaagtttgaaaccgaacggcaggaagtcctcggaaaactcagcttcatgactccggctgataaacaatatcgtgagcttgatcaaaagttcaaagagctgacggaagaaatcaagaagttgaaatgaatgtaaaaacccgtgattgtcacgggttttgttttggaaagttcacgtattatgaagaataatttcaaactgatttgtacaacctacgttcagattcatacgagaaggttcagaaagaaaggttcaggtgaacgcagaatggccaaacgcatcggaattacgggaaacattatggctgatcaatccggccctttcccgggttataatcgggcatatgtcaataatgattatattcagtctgtttctgaggccggcggtgtgccgtttatattgccggtgattcaagagacggcgcttttaaaggaacaggtctctcatgttgacggcatcattctgtccggcggccaggatatagacccgctgttttacggcgaagaacctttacaggctttaagaaagacctttcctgatcgggacgcctacgaaaaggagctgattctcacggcggttgctttagaaaagccgatactggccatctgccgggggatgcatatgttaaacgttacttacgggggaactttatatcaagacctggcacacgcttcgtttgctgacattaagcatgaccaagaaaaagatccgccgttaaaaacccatcatgtttcttttgaaaaagggacacgtctccataccttgtttggcgattcagcgcgggtgaattcattccatcaccagatcataaaagagacggcgccttcatttaaagccgcggcttatgcgaaagacggggccattgaagcgattgaacgaacgggtgaattatttgtcgtcggcgtgcaatggcatcccgaaatgctgacaaaaaaacatgaagacatgaaaaagcttttttctctgttcatgaatgcggtcagcacataaaaaaagcagatcataacgatctgctttttcattttattcttccggtttctccggtgttttgccttgtgtcagcttatggccttcgatatccacgttcggaatgattttatccagccacttcggcaagtaccaggccgcatgtcccatcagcttcatgacactcggaatgatggtcattcttacaatgaacgcatcgaaaagaacaccgaaggtcattgccaaccccatggatttgatcgtagagtcccccgcgaagatgaatcccgcaaagacgaaaatcatgatcagtcccgccgctgttacgacaggtccgctatgtttcaatccggcatggatggcttgtaccggattttttgttttgacatattcttctctcattctgctgacaaggaatacttgatagtccatcgccagcccgaaaagaataccgatggctaaaataggcaggaaggcgagaatcggacctttttccggaatgctgagcaagccggtgaaattcccatcctgcagaacgaataccgataacccgagtgtagcggtcatcgtcagcaaaaagccgacgacggcggcaagcggcacgagaagcgagcggaaaacaacggtcagcaatacaaacgcaaacccgacaataagaatggcgaatttcggaatcgcatcgtttaaccggtctgaaatatcaatattcaccgctgttgacccggtgacgagcaggcggatgccgtttttgtctgatcgtttccgtatatcctgcactaactctttcgttgccttatcattcggcccggtttcaggcactgccgtaatgatggcataatcccctttttgattcggcatggcaggtgtgacgctcgccacattgtgcaagtcctttatttctttcacggcgtcttgaaatgcttcacttttattccccttgactccttttgcatcggcaacaattgtcagcttgccgttaaagccttcgccgaatcctttagacaacagatcataggcgcggcggtccgggctgtctttcgctttcattcccgcatcaggcagccccagttctaaatgcatggccggcagactgatgacagctaaaagaataatgctgaaaatgcttaacagaataggcttctttgtaacgaagcgtccccaggcattcgtgtcggcgctttccttttctttcttcttgtttgatttcggaatcatccgttttcctgcgattgacaacaccgcaggaaccagcgttactgatgccaatacagccatcagcacactgagtgccgcagtcaatcccatcgcagacatgaacggaatgccgacaacggtcaatccgcaaagcgcgacgatcacggtcagtcccgcaaaaacgacggcgctgccagccgttcccgcagctttagcgatcgattcatttttttgtacaccttcgcccaaaaactgacgatgcttcgtaaagataaacagcgcataatcaatcccgacggccaggccgatcattcctgataatgagagactgaccgaggctatcgtaaagatctgtgtcccaattaacgtcagcgcgacgcttacacctaacccgatcagggccgtgacaatcggcagccccgctatgactaatgaaccaaacgtaatggccagaacgacgaaagccagcacaacgccgacaatttcagatacaccgccggcttcaacaccggcccccggcacatcgccgctgagctccgtctgcaggcccttgtctccggcggcggacagactgtgtttaatatgtgaaacagacgcatccgtaatgtcatccgccgcttttttgtacgtaatatcggcatatgccactgacccgtctttagaaatggttcctgtttcaaaaggatttgcaatcgaagcgaccgaatgatctgttttgatcttctttaatgtctcttcaatcgcttgtttttccggttttgacgtcaatttcttcctgtcttcagctccgaaaataacccgtatgcttcctttatcgggcccctttgaaaattctttttgaatcacatccatcgccttttcagaaggtgtgtcgggaattgacatatcctcagaaaaagcaggttttaacgagatggcgatcacaatcgaagcgatcagtatcacgagccacgcactgatcattttgaatcggttgcgggcagaccatccccctaatttatataaaaaaccagacatcgaatactcctctccaatcattactttctgcctaattgtagttcacattcacataaaaaaaacgtacataggggcatgtacgtttgggcagtttttcattatatattcagtttcagaatgcctttttgcatagcaatggtgacggcttccgtccgcgaatcagcgcctaatttgttataaatcgatgttaatctcgcttttaccgtccgctctgagattcctaaatcgaaggcgatcgctttgcttttatgtcctttcgcaacggcttgcagaactatgatttccttgtccgtcagctgtgtttcattggcatttgcccgttccattttcttttcccggaaacgccgcaagatgtccggctgcagaagcacttctcccctgaccgccgcatccatcgtatgaaataaggtttctgagcttgtgtccttcagcagataaccgttcgcgcctgattcgatgccttctatcatcagatgatcttcattataggtcgtcaaaataataatcggcacatcagaatgctcttttatctgtttaatggcttccagcccgctcatttccggcatgtacagatccatgagaatgacatcgggctttagttccgctgcgaggcggacggcggttttcccgttttccgcctctcccgttatggtgtaatggtcatttgtttctatcaaaagcttcagaccttctctgacgacaagatggtcatctgctattaacactttatacatgttccgcttctccttgaattggtatgatgatctcaatttgagttcccgctgatctggcgcttgttatacggaaagtgccgttcatcatattgacgcgttcttgtatccccagcagcccgtaatgtccgctttttctcatttctgttccggcatcaaagcctttcccgtcatctttgacggttatgcggatctgtccctcttcttcctgaacggacacccagacattctttgcttctgcatgcttggcggcgttagtcaggccttctccgatcatgtaatggcaattctccgccgtatgaacgtcaagcacatgatgcacgctgtaatctaaaaaacaagacagcccggaggcttctgtaaaatggttgatttgttcagtgatgctttcttttaagaacccgatctcttctgatttgctgcgaaggttgtcaatggccgagcgcgcatcagccaatgtgcccttcactctgtccattgactggctgatgatgtctttcgctctgtcagtgttaccctttgaaagatgaacatgcaccgcttcaagctgcatatgcaagctgaccagcccttgtgcaagtgtatcgtgcaagtctctcgccatccgctgcctttcgttttgaagcgtcagctgtttcacttgccggtgagcgagctctaatttttcaagcgtcatctgtgttttgattttttcatcaacttgcgcgaaaaatgttgccgcatatgtgataatcacgatcatgatgggagcggcgataacgatgaaacgaagcagatgatgcggatgctcctggtgcagggctgctatggacattaaaatgaaaagatagagtatgagcggcgttttgcccttatccgccattccgataatctgcccgattaaaaaggcatagagaccgatgaccgccgcgatatagccgccggtcatcaagttagccgatgtatatatgataaatccctgtatgatgaaataaagaaacgtttttttcttgacccagcgataggaatgccagtgcagcacagcaaaaatgacgatcaatatcgtgaataacagcagcaataaaaccgtccagctttcataaatgtactgcaaagagactgatgcggcatataccataaaaataaacgccagaccgggcacccgaagcgcaagcatatgcaatgagcgtctgtcacgggagacatagtcttcttgatgttttgtaccaaacaatctctgtccacttccttttagccgaccggcctcacgatgttttattctatttgtcatcataccataatcgcctgcttctcaccttccccttctgtcctgcttgacgggtgaaagaaaaaacagcctgcgggattgttcgcgggctgcttttgttcatatcttttttatgacctttcccgggtttcagcggtctgtctcccgcgcggcaaaaccgcccgcgcatcagaaaaacgttcaggacaccgacagccattccatgtgaacaagaggaagcgattgtgcttcctcttttttaatgtaccgtcaaatttcttctctctttttttataaacaaaatttgtaagactagagctcttttctcaggggaaattaattatgtaattgagaagaggaggtttaaaaaacgattatggaaaagcgtgaattagcggctcacgagtcgctggacttacatgaaatcattaacttcaagacgctttgtgtagcgaaatccaagctcatgcaagggcttgtgtttgatcaggatctgaaaacgttaatggaaaaagacgttcagcaagcctcgcaaaaccttgctgatctgcaggcggtttatgaacgggcaacgtttcaggctcctgttcctcaaaaccggccgacttcgatcatcaattgaaaggaaggtaagcatcattgaaccatgaccatttagatccaatcaattcattacacgtccctgaactcgcagatatgacattcgcaatggattttctcatacgcgcaaaagaaggcgtcagaaataccgccgttgctttaacagaaaccgcctcgccagatgtaagagctttgctgcgcaaacagctcatgcaaggaatcgcgatgcatcaggaaattacagacttgatggtcagcaaaaagtggtttcacccgcatgatctgagcgaacagtataaactggaccagctctctgcgaaaaataccctcatggtcggaaacatgaatctgtttcccgttgaaacgaacagaaaagggatgtttgaccgcacacctgatgaacactaacactggaggtattacagcatgaaggccgtaacgtatcaaggagtgaaaaacgtcgtcgtcaaagacgtgcctgatccgaagattgaaaaacacgatgacatgattataaaagtcacaagtacggcaatttgcggatcagatttacatttaatccacggactcattccgaacttgcaggaagactatattatcgggcatgaaccgatgggcattgtggaagaaaccggtcccggcgtgacgaaagtcaaaaaaggcgaccgcgtcattattccttttaatatcgcctgcggagaatgcacttattgtaaaaatcacctggaaagccaatgtgatcaatcaaatgaaaacggcgatatgggcgcttatttcggctattcagggagtaccggcggctatccgggcggccaggccgaatatttgcgcgtcccttttgcgaactttacccattttaaagtccccgaaacatgcgaagaaccggatgagaaattgagtgttattgccgatgcgatgacaaccggtttttggagcgttgacaatgccggcgtaaaagcaggcgatacggtcatcgttctcggctgcgggcccgtgggccttttcgctcaaaaattctgctggttaaagggtgcgaaacgcgtcatagccgtagactatgtcaactaccgtctccagcatgcgaaacggacgaataaagtggaaatcgtgaacttcgaagaccacgaaaatacgggcagctacctgaaggaaatcaccaaaggcggcgccgacgttgtcattgacgccgtcggcatggacggaaaaatgacagatcttgagttcctcgccagcggattaaaacttcaaggcggggccatgagcgcattggtcatcgcgtcccaagcggtgcgaaaaggcggaacgatccagattacgggtgtgtacggcggcagatacaacggatttccccttggcgatatcatgcagcggaacgtcaatatccgatcaggacaagctccggttatccattatatgccgtatatgtttgaactggtgtcaaccggcaaaattgatccgggtgatgttgtaagccatgtcattccgctcagtgaagcgaagcacggctatgagatgtttgacacgaaaacagatgattgtattaaagttgtactcaaaccttagagaacggaggctacagaaatggccagcgccttacatgaattactcgaaattcaggagatggcttcttttaagtcactttgcctgacgaaatccaaaaccatgaaagcgctcgtatccgatccgcagctgaaagaaatcatgcagcaggatgcggatacatcaacaaggcaattgcaggaatttgcctcgattttatctgatgcaaagcacgaataggagatgaatgacgaatgaatccgattattgaatacctgacggggatggatgcactgacagaccaaattgtcgctatggatttattgaattcggcaaaaagcggagtcagaaactatgcgatggcggcgacggaagccggaacgcctgaagtgaaagcgatcctcacccgtcacttagaagaagccatcgacatgcatgagcaaatctcacgctatatgatggaaaaaggctggtatcatccgtggaacacagatgaacaagtccggtttaatttgcaaaatattgatacggcgctccgcctgcccgtcctataaatgttttcctgctgagacagcacctctggctcagcttcagtatgtcaaactgagaactgcctttacagcgcccaggcaacgaaactcccgcgaatcagctctgcagcttctccagcctttcttcgggctgttattggggcttgcggcggtgattacgtgcgtggcggccgccgggcggttcgcaaatagagcgaagaaggcagaacaatttgttctgccttttcattattttctgccccataggcacaaatacttttcacccgattcgagcggcggttattcacgtagcttgaactcccttaaacgcactcatcacaagatcatgcacataggaatcattcacctcatcacctgtgatcaacaggcgatagaaaatcggtccgtaaatgagatcgatgcttacgtcaatatcaagattctctcttaattcacctttctgaattcccttttccagaaggcctttcgcttggaggcggcggggctggaaaaatcgcgtgcgatattcttccgccaattttgcatccagctgtcccgcaccgattaattccttaataacggttccttcccggctcgtcaaaaaccttgctaaattcgcggcgtgggtcaatatatcttgcactgttgatcctgtatcgggcacaggcagtctgtccgtagcggtcgaaagaaagctgtccatgataacggcagccttgtttgaccaccatttataaatcgttgccttactcactttggcacgctctgcaattttatcgactgtcaccgcgtcaaagccattttccaacaataggtcataggcagcagaaagaatcgccttatgtgttccttcatcacgcggccgtcctcgtttactctgcacatgaatcattccttcccgaattataaacgatacgttcagtatacttaacctgtataaaaaaagaaaacagaaacccatttacaaaactgaacgtttagtatattattcacttataaacaaaactgaacgtttagtttataaaataacttgagggaagtcttgatgaaatgcagactccaaaagcctctgcgtaaaggagatgaatcagcaaaatatttatcaaacctcataaaatcattaaaaaggagttcattcatatggctaaagaaaataaacaaacagcggatcaggggatttcaactggtttaacccttcttctcgcaacggcatgcggtatcattgtcgctaatctttattatgcacagcccttggcaggattcattagtgcggcaatcgggctttctccaagcagtgccggattgattgtcacgctgactcaaatcggatacgttgccggcctactgtttctcgtccctttgggagatattatcgaaaacagaaaacttgtcgtggtatcgctcctactaagcgcagccgctctaactctgacagcatgtgtgaagcatggaacactgtttttagccgctgcgtttttcatcggactgggatccatcgcggcccaagtgctagttccgttcgcatcataccttgcaccagatgccgcacgcggccgggttgtcggcaatgtgatgagcggcctgcttctcggtattatgctttcccgtccgatatccagtctggtcgctgatatatgggggtggaatgccatatttgctttatccgccgcgttaagtgttgtcctggcaatcgtcttatcaaaagtgcttcctgccagaaaaccaacagcaaacacaagctacaccgtcttactcggttcaatgtggaagctgctgcgcacgactccggtcttacgccgccgtgccatttatcatgcgtttgtatttggagctttcagcttattctggacgactgtacctttactattgtccggtcctgcttttcatttttctcaaaaggcaatcgcgctgtacgcattagcgggcattgcgggtgcagcggctgcaccgataggcggccgtctggctgatcgcggcttaacccggcttgccaccggaatcgctctcggtgttgtcatcgtttctttattactcccgctcatgattcagagcagctctcccgtcggaatagcagttctggtggccgcagctatcctgttggatatgggggtatctgccaatctcgtactcagtcagcgtgccattttttcgttggcacctgaattccgcagccgattaaacggattatttatggcaatcttctttctgggcggcgctataggatcatcaatcggaggatgggcatacgcctcaggcgggtggagtatcacattatggattggaatcgcttttccggtcatagcattgctttatttcaccacggagaaataagcctttcaccaaaaataagccgtcaggaccaagctgacagctttttttggggtgtattcttctttacatccatccgaacaaaacatccggattcatgaaaagatgatattgattctttacgccccgctcatatagacgggcgcatgcccgctgccgattctttcagcagcggtaaaaccatgtcataatatgtttagaaataattgtccataggcaggtgaaacacatgaagaagtatttatataaacaccttttgttagctctcgtttcgtccgtttgctttttattggtcttttatgtgggtttaaaaatgacacaggaagacacacccccgttgtcttcttacccgttttacctttttatttatctttacatagcagccggatatttgacggtcggccttgtttcagcctgtatgactgatatcttgaaaaaccgctggacattgaataaaacgtcttccattctattgaaacttatcgtttacttactcataccgtatgctatttttcattctttcttcattttaatggcgccgttgatttatgtgctgttcgagtcgttattcatcctgagaaaagcttcataatcagaaaaaaacataccgcatgctgccggtatgtttttaacatgcttgtcagttttttgcggtgattcgtttgatgttttcttccatcaagccggaaatgagctgttcgtttgtatgaggaatctgtttgagctgttgtacgaccagcccttgtcttgcggctgaatgattttgactcagctttgcctgtccctctattttgctgattttgattttaaaaccttttacccctttgttcatgcctgccagcaatttcgcatcgacatcctctaatttgtacgggctgtcggggctttcgtatttcaatacgagatcactcatcgactgcacggtttcttcctcatccaaaagctccgcctctccgtaaacatgaaccgccacataattccatgtgggaacagcctgattcgtctcataccatttaggcgagatataacaatgaggcccctgaaaaacggctaatacgttttggccatcaatctctttccattggggattcggcaatgcaaaatgaccgtataagcattcgttattcttactcatcatcaatggcaggtgggttgcatacggcatgccccccgccgttgaaaacaatgctgcgaaaccatactctttgattacatcgcacgcttcagcttcactcagctgaaatggagccggaatatacatacaaaactctcctctctgaacatggattgataaagcgctttccgctataataaaatatcaactgacatttaaaaagatacagtttcaaataaatacacatgtcagaggagaacatctgatgaaaaatttgattttcgctttcagaagcggcaccccgaaatacaaacaaatttacgagcaatttaaaacattgattgagcaaggaaatattcaggcagatgagcggctgccttccattcgcgagctggcggattccctgcgggtaagccgcaatacaacgctgatggcctatgatctgcttttagcggagggatacattcgcggagaaacacgcaaaggatattttgctaatgaaatagaaccctctttatttcaacaagaacatgatgttgtttacgctgagaaaaccgaatcaactcagccggccctgattgattttcgcgccggagccgtcgatcaaaagcattttcctctgaaaacatggagaaaattatacaatcaagttttggcatcagagaaaagctttctgtacggtgaaccgttcggcgagagaaacctgcgtgaacaaattgccgcttatctcttggaatcacgcggagtgaaaacagatgcggattcggttatcatcggcagcagcacccagcagatgctgatatatctcagccagattctgaaagaggatttttccggaattatcgttgaagaccctgggtttgacggtgccagagcggcatttcaatttcacgggctatctctggaaacgatgcctgtctatgaaaacggagctgatttttctcaattgcatgcaatgaaagaaaaattaatctatgtgaccccatcccatcacagcccttacggcgtaagcatgtccattcagcagcgccaaacactgatcaattgggtgaatcatagagagggttatattcttgaagatgattatgacagtgaattccgttatacacagcagccgtttcccgctcttgcttccattcaatcagaccgggtgatttatttagggaatttctcaaaatcctttctaccgggcatccgcataagctatatggttttgccgcagcgccttttgcaccggtataaaaaacggtttattcatttcgaaagcaccgcttcttcgcttaaccagctgaccatggctgaattgatgaaggccggtgaatggacccgccatattaagcgcatgcgcactgtctacaagcgtaagatgcagcacttgacttcacatatcaagcagcagttcggcgatcaggtgacgatcatcggcgagcagtcgggattgtatatattagtaagagttcacctgaactatacagaagaaacattaatcgaacgcgcctttcagtacggagtgaaagtataccctaccgctgtctatttcgttgccggaaagcccgaaccgccgatcataaagttaggtttcgcccatctcgatacggatcagatcacacaaggcgtacagcttttgagaaatgcttggctgtcatgaaagaaaaaaggcgccgaacggcgcctttttttatcttttatttcgtatttcttgggaatttcggcagtccaaatataatggcggcgatgccgcagattccgattaaaacgggatagaaagagtatggcaggatgctgacgggtgaaatattcccgaatttcccggctgataacagctgcgcgccgtaaggaatcaatccttgtatcatacacgaaaagatatccagaatacttgccgattttctgttgtcgatgttgaatttatcagcaatattctttgcaatcggcccggctgcgataatcgagatcgtattattggccgcagccagattcgtcacgctgaccaatccggcaatgccggcttcggcgccttttttggaacggattcgtttcgtgatgaactccagtaaaaagtcgatcccgccgttttgtttcatcacaccgaccattccgccgatcagcatggacaggatgataaggtcgctcattccggcaactccatccgtaatcgctttaaaataagaatcaaacgtcaggctcccgcccgccaatccgatgattcccgtcaaaaccaatccgccgaatatgacagccatcacattaataccgattaacgcaaaaactaacacggcgacataaggaagcaccttaatccagctgtaagatgcagcatccgtatggagggcgtggcctgccggaataaaaaataagataataacagtcacaatggcagcgggcaaaacaatcagaaagttcgttttgaatttatccctcatttgtgttttttgcgtccggactgccgcaatggtcgtatctgaaataaaagaaagattatctccgaacatagctccgccgaccacagccgcaatcggtatcgcgctggagatgccaagctctccgctcaaaccggcgctgatcggcgcaaccgccgcaatcgtgcccattgatgttcccatcgatatagaaatgaaacaagcaatgataaacagccccggcagcaaaaactgctgcggaataatgctcaaagcaagattgacagttgaatgcaccgctcccatcgcctcagccgctgaagcaaaggcacctgccaatataaaaatcataaccataatgataatatcaggatgtcccgcaccggaagcgaaccattctattttttgattgagcgatttcttccggttaaataacagcgcaaaagctgacgcaatgatcgcggcaatcaagatcggcaatttataaaaatctccggtcaccagaccagagccgacaaaaagccctacgaataagactaaaggcaataacgcccaaggattcttatgattgttcatctgggtaaaccacctcttttcagcattaaagtcgctaatcacagtctaagcaacatttcacactttaaaagtctgcagtaaaaaagtcaagctgaaaaaaggataagtaatgattgataagatagaaaaagctgttttgtttcctctctttagaaaataaaaaaaaccaaggctcgtttcccttggtacatttcatgcggcccggcgcccgggacaccttctcttcattcagaaatacattcagctttcaatctgtttttaagtttcgcttcattttccaggatatcttcgtaatcctcaatcttcctgtttaatcgttttatggtttcatcaatttccctctgtttctccgtcagccttttcctttcatttataaggatgttttttcggggttcgatcgtatgatcggctccttcaataaataaagcggtatattcaatcagcgcctcaatcgacagcccggcacttctcatgcattttataaattgaatccaattcacatcatcttcgtcataatcgcggatgccgctttcatcgcgttttaccggaggaatcagtcctatactttcataatacctaagcgtcgcggctgataactcaacctgctttgcagcctgcgcaatcttcatattcttaccacccatccttcatacctttcataagcgtgccattatagaatatcatttcataaaaaaataaaccaaaccccttgacttaaagtccgctttaacatttaaagtaaaaccgaacagaggattcatcactttatcttggaaaggaagataaccatgtgcaataatcatccgactcgtgtattaagcgctccgcatgccaaagctaaatttgagcggacgacgattgagagaagagcattacggccgcacgatatcctgattgatattaagtacagcgggatttgtcactcagacatccacagcgcattcgatgaatggggcggcggaatctttccgatggttcccgggcacgaaattgccggagttgtggaagccgtgggtgaagaagtcaccacatttgccgccggcgaccgtgtgggtgtcggctgttttgtagactcctgcggggaatgtgaatactgcctgaacggagacgaacaatattgcacaaaaggcgttgttcagacctataataacctggactacgacggaaaccctacgtacggaggctacagccagaaaatagttgtcactgacagattcgttgtccgtattcccgatcagctggatttggatgctgccagtccgctattgtgcgcgggcattaccacctattctccgctgaaacactggaatgccggtcccggcaaaaaagtggcgattgtcggaatgggcgggctcggacatttagccgttcaattcgcgcacgctttaggcgcagaggtcaccgtcctcagccgctcaatgaacaaaaaagacgaagcgcttgaatttggagccgatcattactttgcgacaagcgatccggatacatttactgagctggccggacgatttgatcttattttaaatacagtatccgcgaaccttgacgtagatgcctacttatccctgcttcgcattgacggtacattggtaaatgtgggagcgcccgctaagccggactcatacagtgtgttctccttaatcacgggccgccgcagcattgcgggttcactcgtcggcggtattccgcagactcaggagatgcttgatttcgccgccgagcacggcattgctcctaaaattgaagtgataccggccgatcaagtcgacgaagcgtacgaacgggttctccaaagcgatgtccgctaccgtttcgttattgatattgcaactttataattctcataaaaaacataccaatatctattggtatgtttttttcagcccagattattttttatttcagcagccatccgggcaccgctttgatataaaccaattcaccgatcagctcaacaatcgtctgtgtgacgataacagcagcggctaatgaggcccaagcatccggcaaagccagcgctaacggaaggactgcgagagaattccttgtgcccgtgctgaagatcaatgctcttccttcacctgtatccagacggaacgcatatgcgataaaacgggagacaaacggcataatgagcaggaatagcagatagatcggaatcacacgtataatgatgtcagcatcattgatgactttgccgatttgtgtggcgacgaccgccaataaaaccagagccataaaaggaacaggcagccacgccgtccattccaacaccttttctcccgccggtttcttatcagcccataattgagtcatcaccgccgccagcagcggcaccgctattaacaataagaatgcttccagaaacggtcccgcatgaacagctcctatcacttctttcccgataaacagccacaggtataacggaagcaataccatctgaacggcgaacaaaaccggcgtggaagccagtattaatctctcatttcctttgccgagctgagtaaagacgatgacgtaatcaatacaaggtgtaagcaataccaaacaaacccctgataatataggaggagattgaggaaaaatggcggttaacacccatacaacgacaggtacagctaagaaattaccgatcagtaaggccgccataaacttgaggtttgacatggcttccctcagcttcaagaatgggatttgggcaaacatggcatacatgagaacagcgataaacagtgatatcgtccatccccagcgaagtcctgaatctttcccggcgatccccgctattcctccgatcacaagagtcacaccatatatccaaatttgctgtttttctaatgtctctctggttattttcattggctgacacctcttccccgcccattataccttcttttctgccggaattaaaaaacaccaagggtctgtgacacttggtgttttcaggacgtgttattgttgtcaaaaccgcttacgaaagcttatttgtgttctctgtcctgccaacgaataaggtgaccgcaacactcgctgaactgaccaaagtccccagaacggcagcaagaattgtcaaaaagccattgggaatcagaaatccaatcggaatgaggcccgcaaacgtgagaacgataaaacattgatagactccggatatgattctcacaaccaagctgctaaaaaaggacatgacgaatggcggaatgaacaaacataaaatgattccgagtgagatcaataaaatcataggctcgtcaaaagaaatgacacgattgccgggagactcttcagccgccgcgaatacagcaaatatagacatcatcagcgtaagaaaaacaagaaaaaaccttttcagcaacgttatgactccttttttataaaaacgggtatctttttttcaatcacaataaccattttatgttatcaaatgaaataatatgaagtcaaaccgagttctgcacctgatttatcggttcttatttttttgataatttccatataattgtccgcaagcagcatctatatcaatgccaaattgacttctgacggtcacgttaattcctgctgactttaattttttatagaagtttacaacttgtttctcatttacttcttcaaatctcataggtgaactaacagtcgggttatatctaatgatgtttacatggaacaagttccctctcttatatctgcttcttaaaagacgtactacttcattcgcatgatcaatagaatcattaactcccggcagcataatataagcaatataaacttttcttgaggtcacacgtatatgctcatctaatgtgtccattacctccaataacgggaagcgttcatttatcggcattaacttgcttcgctgttcattaaaaggagaatgtaatgaaaacgtcaggttgacctgcggataatcctgagtgatttttttaatgcccggaataatacctatggtcgaaatagataaccgacgagggcttaaagcaaacaactccggatttgtaagcacatgtaaagcatcaaaaacttgtacattcgctaatgcttctcccattcccataaaagaaatactatcaattgaatgtccttttaagtgaaagtacaaaatttggtcagtcatttcatctgatgttaagctgcgttttaaaccaatatctcctgttgcacaaaatgcacagccaaaatgacagccgcactgcgaggatatacaaaatgactcccagccagctttatatttcatattgaccgtttctattttttcgtctcctgaaatttcaaataagacttttgttacttgctcagaatgctgcacttttaaagcagcaatatttaaaattgactctccaaactcattcattaacaattttctcaaggatttaggaagaaccgttatttcattaaaatgatttattctccctttgaacacagcatttttgatttgattcattctaaaatcaggaaacttattttgtttcaggaactcttgaattcttatatacttgtttttttgttgcatgttttctcatccttccataaaactctggtttgtttgagtaaatagaagggagtgatcatctaacctttttttaaaatcaggcacaaaaaaacaccgacacaattatcggtgttacgcttaaataacatcatgcacaaataaacaaggacattatgtcattggattatcgtttatttgacatagagaaaaagcaccgataactgtttttgtatgatgatttggcttaaaaaaggacagactgctccctttatccgccaagatgtttccaatttttgcattttcaccatacaaaattccataaatcgttatcatcgctttcacctctttcttgtcaatattaacaataatcaccatatcataagggttcccttatgtaaagttaaacaaatgcttacgcccccgctaatgacagtattataaaacttgcttattaagcctaatccaagtacagaaagcgcgctgatcacatgtttcacttatccgcgacggaacatttcttatataatgggtgaccggcagctgcctgcttgaatcccaatcttcttatagtgattttttatattcatgacagtatgatgatttgtcacttcagcaatcagatcgtttattcgatccagattaatcggtttattttctgataagctgctgaagctttctctgatttcttcaggatagacatttccggccatgcttgacaggccgttacacccgttactcagcatcttcggaaattcaacgtctcctgccgcaaacaaaataaagtgatcagggaactctgtttgtttatgacgcagaacgtctcctccttctttcagcccccttatcccgggatgccggcttattaagtctttaagcgctttctcactcagattaaaaccggtccggccggggttattataaagcacagcctctttagaggtatgactgagaagttcgtcaacgtaataaacggcttgctgctgtgtcggtcttatataaggaggaaaaccaatcagtacagaatcaatattggttttctcgatgtgtttcatcagtttgacggcatcactggttcttacggctgaaacaccgaacatcagttcaacatcttcaaattttcgctgattaacatactcaatgatctgaagacgctcatctatgctgagtgaatgctgttcaccagtcgtgccgcatatgagtaacgaatggataccgctgtttttcaaatgttcgacaatagcatcaaatccttctaaatataaactttcatcttcatgaaaaggcgtagggatagcaacattaaaatttcgcatgagaatgtcctccaagtacatattcttgaatatctgcagagtatcatataacactgtctgacatttaaaaaggtacagtttcagataacgcaacatgtcagatgtaaagccgacacacaaaaaaagcaggcaaagagagcctgcttcatagcttcgtcttacagcggcccattccccggatggcttgacaaatatgagtaataaggcaaactgatataaaaattgtgctaatgaggtggggttaatgattttagatttaaaaggtgaaacgcacatggatcatcttgtgggaacgctgtattctgccgttaatgaaaatgacagccgcttaatatccattgtgtcagacatgtcacagcaggagattgattataaaggaccaaatcatcaaccattcaatggggaatatggcatatggcagaccataatagatatcatcaagctcatattcatcagcttcgcaaatggtatgaagagaaacagaaacttggcagttaaagccgcttattaggaggagcaacgataaattcattacaaatgtctattttcactgactgccaatcaattaaaatggtcagacaaaaatcgctattacatttgcaacgtatcttaatccggccggcgcagttgtaataaaaaaagaccgctttcccctcttcttcaacgtaactgacatcatcatcttcatttttcttaacataaggttcagcaaatcgttcctcggtatattccacacattgctttcaaatgcaggtgcaattctccttgaaacagcaaatggttgtttggtttattgaattctttcatattaaaaaatggagtcattttaatgatcatatcagtctccttccaaacgagattgcatttacccattatttgttattctgcaactgaatcattatcttttatatcaggaattcttacaaaaaagtaaggtaagtgtaaggtattcgcatttattcgatatgcagtgttcattagaataagaaatataaaaggagtgatgaagaatgaaaaacatgagcattttcattattatattaggctgcctatcggttttcatattaggaggctgcgctgatcaaggcgccgtgctggaaagcgattattacgtacaaattcacggaaaagcggaaaaaaacaaaaataatagcaactacgtttacaatttagaagggtataacgagaaaggtaagaaaaagatggtttctttctttgttgaaaagccttatcaagaaggtgacattgtacgcgttccgaggagctatgagggttataccggagaatctgaagctattaaggccgagaaactgcctgaaaagatcaaagaccgattcaacattgagaaataacagcgagttgagcagatatttaagtctgctctcaattttttacgacaggttcattcgaatgcaaaatgcaggatggctccttgggccacttctacataaaagattgtgcaaattaagcacaccctccccattttctttttttggctggttacaactatcggaagtggcattgacaattcttctatggtcccaagtaattaatgaactctatagtgggcggatacgtatacggcggggtttgcagttttttaacttcttgttatttgagctatttcgacttttacttgaaagaattaaattagagagtctgaacgaggagtgaagcacgcgctccatgtgaatccatttagttcaaactgaatatgcgcggactaaaatagttgcactgatggacgtattcaacacaaaaaagagcagtaaacacgtaagttactgctctcctcagtctatccgccgttcatttgttttacaatgtattcagcatcatttcctacaccttgaagcagcgctgaacctcgcctatgctgccaaggcaaaccaataaagtacaatccctccgcagctgaaacaccccggtgatgtataattcggccttccttatccaaaacaccttctattttcatccaccaaagcggattcttaaaaccagttgcccaaataacattgtttacttctaatgaagatgaatctttaaaaatgacttcattttgctttccggctatgactctttgttttaagatgatcttcttctgtcttattgcatgttttaattcatacccaaatatgaggtcgcctttcttttgaatgaacttgcctaatattgatgtatgacttgcatgtaaaactcctaatttatcaaaccaccaaaagatgcttctttttccaatccataaagggaaataaaccggttttttactgcaagccaaatatgtaactctttctttggataactcaacagctatctgagccccgctattcccgccgccgactaccagtacattcccaggcgccagttgttttgaatgtttatattgtgaagaatgtaattgacgaatatgaccggctacatcctttgatattgatggaatgttaggggtatgaaaaggacctgcggccaccaccagattcttcgtttgatattcttcccggtttgttttaattaagaaatagttgtttaatttttggacacttattacttctgtccgtaattggatcgggatttcaaatctttcaacatattttttcagataagcagcaatttcattttttgaagggagtccatgcttgtctccttcaagctgcattcccggcaaagagctgtacattcgagaagtaaataagaccaatgagtcataccggtttttccagctttcccccacttcatgacttttatctaaaatgataaacttttgtttcgacttccttagataatatcctactgagattcctgcctgaccggctccgattactatcgtgtcgtacatatgaatcccccctccggttttatcttaattgtcagcagacaaagttagtccctatctcctcctttaatgatgatgatggtcacgcggattctcagtttgggcctgacaaagaatcgtattgtcgtgattatgcgctgccgtttccatttgaatggttacatgtgtaatgccttgatctccaagttcatgttcaattttgcgtaaaatactttcactttcagaaatggtcagctgatcgttaacaacagcgtggcaggaaagagcattcaatccgcttgtgatagaccatatgtgcaaatcatgaatgctttgaattccttctgtctcttcaattgtatgaatgatgtcagtgacatcgatattttccggagttccttccattaatacgtgaatggagtctttcgtcacatggtaaccgcttctcagcacaagaatagccacaatgacactggccactggatctgcccagctccacccgaagaagatgataaggatcgcagccagtatggcacctacagatccgagcatgtcacttatcacatgtaagtaagctcctctaatgttcaggttattctttgtatctccgccgttcagcataatccaagcgaccaatatattcacagctaacccgatgatacttatcgtcagcatgccggttgttgctatctccggcggatgagagaaacgtttgattgcttcataaatgatataaagggaaatcagtattaatgcaacaccgttgatcacagctgcaagaatttcaaatcgtttgtagccgaatgtcttatgatgacttgcctttttttcggccaatttaaaagcaatcagagcaaccattaatgagattgaatcactcagcatatggcctgcatctgacaaaagcgctaaactattggttaaaaatccgcctatcgcttctattatcatataacctgtaatcatgataaaagagatcaataaaaccttcttattggatccgccagcgtgattgtgattgtgacccataaaaatctcctccttatctaatacactgtatttattatttcttttctgctatgaagcattctaacacggacacaaaaataaccttatatgattatgtgctcatatatgaatatataggttctttactgaaatgtcaaaatattttcaatgaaaatgtttcttatcattagcttagcttgggaggttgcattgctatgaagccgcggattacagtaattactttaggcgcagataatttagaaaaatcgctgcacttctatcgggatggcttgggtctgcctacagaatacagaaggaacagccggtacagatttggacgacttgcaaacgggactgaaacttgccctctgggaccgcaaagacatcgcacatgaatcaaacgttacgataactgctcccgctcatgatactttttggggcggatacgccggtcacttccaagattccgacgggcacttgtgggaaattgtttggaatccgcactgggaatataagtgaataaccaacttttatagcaacaataaaaacacacctgaatgttctggtgtgttttttattttgtttcccacaacgatcaaactatttatacgatggcgggatgctttgcggaaaacggaatacattttcgggatcgtatttcgcctttattctttgaagccttgcaaagtttgagccgtaatatgcttttccgaagttctcgatattttgatccggaacattcacataagaacctgttacatatggtttcatcagctgacgcactctttcaactgatgcaagattcgaagcttcttgtgatttatttttccaactggccgtccattccgtataaaataacggacggcgccaatagaaggctgtttcactgcttggaactctgcttatcgcaccgccccaattgataaaaaagaaattggtttctgtcccagtcgctttttctaaaaattgtctcattactgcaataggttcttccggccaaagattgagcgcccacgccgaggagaatttaacactctgatcagacctgccgggaatcggttcatcaggatctaagaaatctatacaatccggatagtatagtgttttgattactgtttgtgccggcgttccggcatttaataaaggttttaataattgaatcagctccggttttgacccgaggaacaatccttccgcatggcacaaaccatttactttgctgtaaatctcaaggtagcatcctaatcgttcgtctgtaaacggtgcccatttttgccatgctttgaataccgtttctaactgttcccacggccaaataatattaaagacggttgcggttttaggggcacggtgaactttgaacgtatattgggtgttatatccgaaattgcctcctccgccgcctctggaagcccacagtaaatcttcattgcgggaatgatttgcttgaatgatcctgcctttggcatctaccattttcagtgcgagaaggttatcacttatcaggccgatcgatcgtgaaagcactccaaatccgcctcccatcgtgattcctccgattccgacggttggactgtctccgaacggggccataaaaccttcccgagctaaaccttttacaagcgggccgacgtgaatgccggtttgaacggttgccaccgcgtttttttcatctaagaaaacgttattcatgtcactcacatcaataacaatcccatcacttaccgtggaaagatttttatccagagcatggcggccgcttctgacacgcaaaggcacattcttctcacgagcccatttaatagcattacttacatcgtatgaattttgcgcaaaaacaaagacaagcggacagacatcaacataagggttccaattcttaaccgcctctgtatagccggggtcccctttgaagatgacacgtcccgttaactgtgctgatcccatctatttcactcccaataagcatttgattcccataccagtatatgtaggaattggacaaattcttagacagatgttctgcaaacttaaaaatagatacatatacgcgaagatgagaaaaaacaaaaaaaagacaagtgcggcaacctgccgaaactcttgtctctcctgccatgataggcacttacatttattggcgtgatatcccgaccaaactatggaagtccatagaacattatgtttgccctgccatgcgtggttctgctgagcaatctttctgtttgatcccccgacaagaatctttttctttatcgtttttgcacccctgtacggataaaatcaatacacattgaatcttatcttttacatgatgaaaagctcttattttttcttcttgtgcttacgtttgcaatcatgttttttctctttcttatgacgttttttacatttcgcttttgctttggctgctaattttgccgcttctacctttgcttcagctgctgcttttgctgcttctgccgctctggctcttgcttcttccgctcttgctatggcttcttccgctctggctctcgcttctgcttctcttgccgcttccgctcttgcatcgtcgtccgccatatcaaaatcatggccaaggtcacaggcctcgttgtatggctttttcttctggaagtactgttgatcgtcaccatcgttataatacattacgccactccttctctcattttttaatctctacatactatgtaaagaaagatctgcagcttggactggtattttgatgaaccggcacatttttagggcaattttcatttatcattgcaacagaatctggatgcctgcatgaaacttgaatgattttgacgattatcttaagcagcgtaaaaagggagactacgaaaaaaccaaggggttaaacccttggtttttttgtaaaaatgataaaaaggatgctgcacgctgcagcatccttctgtaccaactttttattgaacgattggaaagtattttttagcttttagtttgcttgctgtgtttgttttactggttctttgctaaaaagtccgacaatgttccacaagataatagcagcagctatgattacacgagccgtactgacttcttgattagtaaacaatttatagccatatattgatcccaatgctgctatgcaaaaaatattgaaccatttactccaacgcaattagaaaactccttataaaagattacatttccaaacaatatattataatattaacaaattttttcaatatttaaccttaaattattcttaagtggttttcctgatcattttctctaatcgtcattcgatctttcggagttttgatcgtttttttgttacaggctagacccagacatcattttcagctgtttgatcagttatttcctgcccggtattgacaacacctttaggttctgcaagcaaaatgttacactctgattctgcataaggtttatgttcaacatttttcggaatgacaaacatttcaccttcatttaattttacttttccatcacgaaattcaatgattaaattacccttaataacaataaagacttcatctgtttcgtcatgcttatgccaaacaaaatccccttgtactttaacaagtttaaaattgataatcattcatttcagcgattacttttggagaccattgatcttggaatgcagataatttctcttggaaattaatcggtttatattccattctttccccttcccgtgtaaaactcaatcatttaactagtcccaaattaaaggcctgtcaacctcagcagttctgaggtagtctaaaagctgaccggtatgtacagactcatggtaagcgattcttaataacatgtctcccagttcgcgaatatatccaacatcagacctgtcaatctttatatttgttaaatctgtttcgtttaacgatttgatgaatgtcaaaaacgcggcccgatacggttttgcaaattctaattcttcgcttactgtggtaaacgtttttgattcataaggattaatagtttcctctgaaaactcactcatatttttcattaaaatttgatgataaagaaattccgcttctaatacatgtcttatcatttccttgcacgacatggcttcggagtccgggcgccagtccattttttcctcaggtacagctgtccataacttgatgcttcgccgtcttacctcttcaaaatgtaaaacaataaggtcaattgtattcaagtattttcccccttttatttttaaataataattctccttcttcccggaaaaaacctcttcaaataaaaaacatatcctttcccgactcgccggattgataatcaaactatttttaagataaggagatattcattcatccatacaatagactctggctgaacatatactgaatgatagttttcatcagaaaggagaaatcagctttggcaaaatatcggatcatgacctttgacgggggcggtaccttaggtgctttaagtttacaactattgaacagactggctgaagaaaatccggcattaataagccgaacccatgtatttgcgggaaattcaatcggttcatttactgccctggcattagcaagcggaagatctccgaaggaaacacttcagtattttgaggatgaaatcctgcccgcattcagcacttcccggccgggcggacctgtttttaatcagcaattaccctattccggttttattaaagcggtacgaaactttttcccgccaggccttcgtcttaaagatgtaagaaaacgaattgttgtcccttcattcaaattatactccccggcactggatcgttggacgcccgtattatttcacaactttcccggctctccctatttaaatgagaaagtgagtgatgtcatactgcggagcagcggtgctcccgcgacacagcgcgcctatcaaaactacgtggacggatatgtagtggcaacgaaccccagtacggccagtatcgcgtttgcggttggtaaagccaacgtgccattggatcaaattgcggcgctatccatcggtacaggtgaagccccgactcggttaagaagagatacgaggggatggggaatggtaagtgcggataacatacgtcccgaaaatctgaagaaccttcctccaaattggggagtccttttggacaggtcgcctaatgaacctttactgccatttcttcagatgatctccggcggaaatggctactatgaatccatggtcagcgcgaatctgctgggagatcgctttttccggttagatccgcggattcctaacttctccaaaacagacccttccgtggttcccgctgtcattgaaattgcaaacaaaaccaacttacagcctgcgaatacatttatagagaaaaactggaacgacagcgctaaataagcaagaagtttacatcatcatacaatgaacaaaaaataccaagggactcaaacccttggtatttttaatgcgttcaatcgggccatttattgaatagaactgccccagaagtcgcttcccattacgtaaagaaagcgacttttagatttgattttcaagttccttttacaaattttgaaaaggccattgactattcagttgtactgtattaagtttaactatatagtcgaactgaatagaggatgaggatatgaaacataaattattaccgctgtctgaaaccatgcattatattttattagctctgcgtgagccgcttcatggctatgccgccatgcagaagatagaaaagatgagtaacggaactgttattttagcagccggcacattatacggcgcgattgaaaatttgaataagcatggctggattgagcctgttggagaatcaggccggagaaaggtttatatgataactgcggaaggaagcgccattttgaagatggaacaaaacaggttactgcatattttatccctgcacgaaggaagtgaatcgaatgaagaaatttaagatgttttttgatattgaaaaagaggagcaatggctgaacgagcaactacaaaaaggctatcgctgtacaaatatcagcggattaggaatatacactttcgaaaaaaccgacaaaaaatatgtgatgagactggattatcaagattgtttatcaaagaaaaaatttaaagagtacaaagaaatctatgaagacttcggctgggtttatataaacagcccatggcttagcggaactcggtattggcaaaaagaaaatgatgatcaaaatgaaatcttttcggatcgccaatcaaagagtaattattataaaagactaatggggttttcatcttgttttggtttactgtgcttgttttattcttatttgatttacaaggattcgggtttatatttaactgaaggtctgtggagtatggaaagcgcaatgttttggaaagcatttttatttgaaactccatttgccctgttgaggtcgcttcccgcccttatggctgttctatttggctgcagtttctataaaacgtatcgaaagtattcaatgttaaaagaacaataacacggggaagttacattcaaagaagtaattgaggatcatgcatctgccgaagccgggcgctttaaaggaaaaaaagcgccctgaatttgctgataaatcagatgacttattttgttaatgatacatacttatttacaatggcttgagcgagacaggctgatgaatcaacaatagtaagtccgcttcttttttggtccgtgaccatatttaaatccgtacatgcaatgataaccgtatcagccttttctgctaagtcatggtgtaattcatcatataatgtaccagcctcatcgatttgaccttgtttaattttttctattatttgatcgacatagatttgccaactatcttgatgtaaaaaatcataaccttctctgtttaacgcttcttgaaatattccggattgaaccgtaggaacggtggctaaaagagctgctttttttgagcctttaggtattttttttatggtttcatcaatcatgttcagtaaagggactgaaatcgatttttttatttgattaaaatagagatgtgcggtattacatgggatggcaataaaatcaacacccgttttttcaagctttacagcacccttaataattgcattttccatgtccgtatgattgagaggtttattcatgtagaaaggtgtcggacaggaataaatcatcatatgtggaaaatccgtgtcatgtattgctccatatattttttggcactcgtctacgactttatctacaaatggcccagtagattttggccccattcctgccagtattccaatcataattgtcctcctctgtaaaaatgtgtacgaatacgatcacgatgagttattcttgtgtttctcatctgaatctgctctcatttcttttctggctttcttctcctattttatcatttcattaattgaaaaagggctttaaaaaagatagctggcaaaccagacgacttgctttaagtaacggcgcagccgcaaacaaaaaataccaaaaacctcagaacccttggtatcattgtgatgcggctgagaggacttgaacctcaatgggttattcacccgctgggccatcaataaagtgaaactgtgttttctattacaaaacctttatatattagtgtgtgtttatattgatcatgttattttacaaagattaattcatattgtggagtaaaaatggagtcgtttttttcatcaccagaaagttacatgacatgtcttgggtgccatgtttgttaaaatcaccatcttcgttttaaaacgtacaggtttatagtgttccaaaacgctgtcctaaatgcaaaaaaatactggacgcaactaagtcaaatgtttttcacggtactatagtcaagacttgcccaagtcaccattatcaaaaagaattaataagaaaccaacgggtgatgaatcttttaatctttcattttacccgctgactcatatcaaaggagctttaaccaaattttaatagctgtcgcacttattaatagcgctaaaatccattgcaggaattttgtatttgctttttgcccaacagatgcgccaataggagaagcaatcaaactggcaatcataagaaccagagccggtgtaaaaagaacctggcccgtgattacttttccaactgttgcgccaatagatgaaagaaatgtaatcgcaagagatgaagcgactgtgattctaacagggatatttaaaatcgataacataatgggaaccaggataaaggcgccgccagctcctaaaatacctgatacgccgccaatgagaaacgctagggacgaagccaaccatttattagatatcacttcttcgtcttcgctatgttcttgtccttttttaggtataaacattaaaataactgctagtatagccagaattccgtatataaagttaattcctttttcagatatataatgagaaaagtaactccccaatacactccctaaaaggatgctgcttcccatgtacataattaatgctttatttaaaaaaccacttttacgataagcccaaacacccccaagtgtcgcaaagaaaacttgaatagcccctatccctgaaacttcatgggcagttaatgacatcactcccactaaagaaggaatgtataatagcattggataattaataactgatccgccaatacccatcattccggaaataaaggcaccaataaaccctataatgaaaagagttgtgataaaagcaatatccattttggttcctcctttcaaagaaaaagggcatctttgtattcgataccctttcacattcattagctttttttaatccagaattttaatacatcgccttcatcagtttgctctaaaagatcatgcccgcctgatttagaccaagctgcaagatcatttttagctcccttatctgttgcatgcacttctaatatttgacctgattccagttcattcatcgctttctttgttctgacgattggcattgggcatgccagaccttttgcgtctaatactttatctgatttcatgttcatctctcctctttttaatagaaacttgagttaccgtattgcacagcggtttggaccaatctccatttcacgctgtttttcttcatctgggctgattttccccatgtttgtttctcgaatctcttggtatgcatttggctgcggaggcaaatgatctgttactaagtgtctgaattctgtttcatccgcaatgttcaaaccatggttctcgctaaataatgtacttagttttttaccaacacttccatccttatttagctcgtcaatgatcataaagtgtgccggtaatacaattaaatcctgtgacaacgctttgtaacggctataaagcgttgttcttaaatctcctgcccaatcttctgccataccggctaagtctggtctgccaattgaatcaataaacaagatatcacctgaaagaagatactgatcatcgacaatgaaagaagtggaaccaatcgtgtgccccggagaataaatcggttgaattttaatctttgtatttccgatggtcatgtcgtttccttcttccaacggctgataatcgaataccgcttcttcagcatctttaggcggtaaccagtaggctgcttttgttttttcagcaatgactctgccgcctgaaatatggtccgcgtgaagatgtgtatcaaatacgtgagtaatcgtcgcactcttctccttcgcaaaatccataaagaaatctaccatacgcgtcgcatcaataatcgccgcttcaccattggaaatgaccatgtatgataggcagcctttaccgattcgaacaaactgatacatctcaccgccatcttttaaatccccgacttttaccggctctaaatgttcgctccatgctttcattccgcccttaagataggatacagaatgacctgcttcagaaagcatttcggataccatgacagatgaaccttcttttgcacaaacgaccagcacatctttatcagaaggaattttctccaagatatcttctacgccatctaaaagatcgaaatacggtacatttaaatggttaaaatcatgtccttcaatcttccaatcgctaaagtcattttcattacgtacatccaaaataaataaaggttctttgtgaaagattttttgtgtgacttcttttgcggtaagtgcttgcacggtcatgtttacatacctcctttttctgttttacctgtccagtcccgcataccgggaataacattaataacctttttaaaaccttgttttttcatggtgtgagctgccatttcacttcttcttcctgaatggcaaataatataaatttcatcatttttgtttaattcgttaaagcgcttttccacttcgccaagagggatatgcaccgctccggggatatgagcttcttcatactcctctatctctcgtacatctaaaatgtgaagagactcatcacgatccactttctgtgtgaaagcttctaatgaaatctcaggaattgaagatgcattttctgatgaatgctctcctccttttcgaagaaagtgacgaaggacttctccctctgtttcagtacctagatattcatggcctgagctttttgcccatgcttgcagatctgccgccgatcctttatctgttgcttgaatttctaataggtcaccagcttttaattcttttattttcttctttgtttttacgataggcattgggcatgacaaacctttagcgtctaatacaatatttgctttcacggtttttttcctccttttcttatataggggcgggggtatataaatatgcaaaaagttattccctggatgttaataccatgtattcataccgccttttatatttgtgatgtttttaaacccttgtttcttcaatattttacttgcctttacacttctcattccgctttgacagatcacaaagacgtctttgtctttcgaaagttgatgagtttgacgaggcaagatagacaaaggaatatttttgaatcctttaatatgccttgtacggaactcataagaagttcgcacatctataaactgtttgtctttgttttccgcctccgattttaaatcagcagttgttatttgtttaacaccatgcaatgggaaaaaacgtcgaaatacgatccaaagtattgaacattactccgctattcatagtgttatatccccccttcacttattcaattgcaatggatcacattagataaataagttgacattgccttcctcagcgtctgccaaataagcagctacaccagcatagtcgatatcatctaatagttctttttcctgtaaaccaagaagatccattgtcatcgtacaagctacgagctttacaccttgttcttgagccatctcaatcaactgaggcaacgtaagtgcattatgctttttcatcacatttttaatcattttagggcccatacctgcaaagttcattttagataaacccatcttatcggcaccgcgaggcatcatctttccaaacattttttcaagaaatccttttttcactggaatcagctcttctttacgtaaagcgtttaatccccaaaaagtatggaagatcgtcacttcatgatcgtaggcagcagcaccatttgcaataatataggctgccattgctttatcatattccccgctaaataaaacaattgttgtgcgttttgtttgttttgtcatgtttattctcctgaccaatcactattacccctgggggtatattgaaattaaaaattttttcgaaagatctcctattattcaattcaacatattaaataccggtaggggtatattataatgaatataaaaattcgtcaaccttaaagatgataggttgatgaatttttttatcggctctttaccaataagtcgaccgcttcttttactaagtgttgtgtgtcttctcccttttctaaactttcacgaacacaatgttcaaggtttgtgctcacaatcaaacccattgctcgatcgatcgcattacgtgaagcagctaattgggtcacaacctctctgcaatcttttccttgttccatcatggtcaatacaccttttatctgtccttctatccggcgtaagcgatttttaatcttttgatcatattccatgcgttgaactccttctttgaaatttatatatttgcatgttatccactatcatttcatactgcgctttatcacactacattattaactagataatgtttgtgaatcaatattatacccttacaggtatactgtcaattttcaagacggcatgagaatgattttaaagagttaatattagtatcccctgtttaatcacaagaaggcgctgaagttgtacgtgatttaatgcgtatgaagaaagagaaagcacttaattcaagcgaaaaaaatgttggataatgcatatgaatttttgattagtgaactggaagtcattaaaggaatcactgaaaaacaaataaaaagtttctgttaaggttaatgacagataagtttttcagagtattacgatcagacgttcaacttcttcaacttactttttaaacattaaccgcttttattactcctcaatctaatctgttatatttttttcttcaacgaacacttgaattctcgatgaaatagtcacttgatttttgtaatcctgattcaccctggcacggacaaggagccgtaacgatggaagagaggcagggctttcattgttttaggtctaagtgattatttccggaagaaaaaacaaccactctcccctttatctttcagaatttcttacatctcttgcgacagtgaatagcagttgtttatcttatttcataaaaaagatatgcgaattgtaacaaagaataacataccgttaccttgagaacataaaaacaaatcatttatatattccacatatcgtcaatccggtatgttatactgtaaacaatcctttgaggttttaaacctttttcttaccttgtagcatctgtccctactcgaacggtgagtagggttttttattcagtatgatacagagaacataaaaaaacaggccctatataaagagcctgtttgtataaacgattgaagattaagcagttttttgaacgttagcagcttgagctccacgagcaccttgctcaacgtcaaacgttactttttgaccttcgtctaaagatttgaatccgtcactttggattgcagaaaagtgtacgaatacatcgtctccattttcacgttcgataaatccaaaacctttttctgcattaaaccatttaactgtaccttgttccatttttgttgcctcctagtgtattacacattgtattactatccttgcccaaagtatcatcaagacgaaaagtcgatattcatactatcctttacacgaacaaaaataattctcctttatcatagcacgaaacggaaataactgcaaattaatatcatgtttcattcagggttttatttgttaaacgtgcggcaggtttttttgcgagaaccttcatttggaaattagaagttttgacggaccccttaccgtactaaataataaatatcatgttgagaggtgtatttttaaaaagcccactcacgaaaacgagtgggtttacaaaagctctaactaacccgcaaaggttttagtcagagctatttattttttgatccaactcactaagcgcctactctgtcatcagctcgataatattcattggaacgtgataaatcccctttttcataaaaataatcagctactctgattgcaaagttttcaatgtctccgtacattcttaggaggaagataccattagcgatgacgctaatggcgccctttgtttctactcagtaacttattcagcttctcccacaactgtaaagcgttcatttatatgttttggattttctatttcatccaatactgcaattgcatagtctgcatagctgatataactttcgcctttcgagttcacaagaagatgatcttttcctgactgataaaacccagttcttttcccgtctgggtcaaataccgctgaaggactgataaatgtccagtttatatcagaagtttcctttagctcttgcaagttacgaccttgccctttagctgttggaataaaaatctccgggaaatcaggtgtatccattacactgacagttttattttcgtctacataaagactccctgctccgcctacaattactgctcttgtacctattccttttaatgccctaattaatgcccggccagcatctacatgtgcctgttcttctcctaatggagctccgaaggcattaactattacatctaacttttttagatcatccgatgtaagatcaattatatttttttcaatgattgaaaccttttcctctttaagttttgcagcatctcttacaattgcagttacctcatggcccctgcttaccgcttctttcaagataagacttccagcttttccggttgcaccaatgattccaattttcaatttaaagtcctcctaatcattcaaaattttaaatgtaaccaaattgattacatgtaataattttagttacaccttatttgtttgtcaatacttttatcaccttgttaattgagcatattagagtgaaataaacttgtaatacattcagttacaagtgtactataaagagtgtaaagtaattaggatggtgaagaaatcatgtctattagcagccgttttgctgtaggaattcatatattggctcttattgaaataaatgaagacggaattagcacttctgaatttttagctggaagtgtaaatacaaatcccgccttaataagaaaaattatggggatgctgaaaaaagcaggtttagtaaatgtacggccaggtattgcaggagctgaattagcgaaggatttaactgaaatcaccttacttgatgtttatagagcagttaatgttgttcaagataaagaattgtttagtatacatgaaaatcccaatcctcaatgtcctgtaggccggaacatacaaagtacaattggtccaatatttgaaatcgcccaatctgccttggaaaaagctcttggacatataacaattgaggatgtggtaaaggatattatcgaaaaagaaaaaacggccgataattgttaaatgattcacagaaaatcttttatcagactggggataagaaaaatcaataaaacaaaaagggactggatcatattgaatccagccccgaattgatattgattttagatttagattacggtaagggatataaaaatgctcatgataaagagaaaaaattaacgacaatgcacacgatgccagattctttaatagggcgtgagtattactatccaacaactcaaggttcagaagctaagttcaaacaaagacttgaggaaatctcggattggtataaaagaaaccgcaaatcttagtttgaacgaatatgttctgtatataaaaataatgaggtatggagtgaattgataatgaattatgatgaaataaaagattactgcctaacctttccaaactcttatgaagaccacccttttggagatggttggactgcaattcggcacaaagggaataagaaaatatttgcacttatcttcactcgcgacgaacacttatgtgtcaaccttaaatgcgaacctgaaagggctgattttctgcgtggtctttttgaagaaatcaagcccggataccatatgaacaaggagcattggaatacgcttaccttagatgagggactcccagagcatcaaatccatgacatggtaaagtacagctttgaactgacaaaaccaaaaagtaaaaaggaaacataacatcgaaggatagaacgctcattatagatattcatccggtgcaatgatacagaggaatatgcaaaaaacctcaaggtagcaatttttaaattcgtatttacgagatgattttttcgttattgtgagtcctttgtttctcgacataggttgaacaaataaaaaaagagcagactcaaaatccactcaattaattaagatgattgctcatttcatccagacacctataaaaaatgaaaggtgacgatgatatgccgcaaaggtcatttagcgtttaattaatactgataactcaccttcaaacactttttcctctttctgattataggtagataacaatacagtaagtatccccgtctggcttttatttggttttttatcaataaccttaacaatagtgttcagtttatcattagggtaaacgggtgctaggaattttatattattcattcctgtcccagcaataatatcgtcttcatgacacccttcttcaatccaaagcttaaaagtaatagataacgtttgtattccagaagcaataattccattaaacctgcccatttttgctttttcttcatttaaatgcatgtactgtggatcatacacttctgcaaaattcattatattctcttttgttaattcaaaagatttagtttgaaaaacctgcccgatggtaaattcatccaacttcataaataaatctccttgaatctaaactttattattaaatctacgtagcattttaacatactggctctcacacaacaacttaacggtaaaacaattgttcccctatcaggaatgaacaagcacattgtttttgtttccttgcctttaacctctttataatcaggtgttttcttataaagaccaaggcggtcgccatcaccatcacccggcatatgtgccatttcctcataagaatctccaagcttctcataataagaataagcagtcagcctacgagaactttcttctggctgataaaacgctgaatatacttgccgtcatcatatacagaaattatggcgttatctcttttgtactcatctgaatctgctcgcatttcttttctgactttcttctcctgcttcatcacttcattaattgcattatcatatttactaccgccgcacgcagtcagcagaaggatgaaggtgactgacaaatcatacgacctactataagtaagtggacagtaacagatgaatttttataaacaaaaaataccaagggtgtcaaaacccttggtatcatagggatcggccgagaggacttgaacctccgcaggttattcacccgcttggcccgccatctatattcataaaactattgctcagttgtcagcatgtgaagtaaattacgaatttccttgttataacttttaatttcttcttcattacaaccggttttatcaaatactgcattaggtatcattgtgactttttctttaaactcattcccttcagttgttaacgtaataattacacttcgttcatcctcttttgaacgctctcttataataagacctcgctcctcaagtcgttttaaaactggagttaatgttccggagtccagatataattcttcgcctaaacctttaacagatattttttccttctcccataaaacaagaagaaccaagtactgtggatacgtaattcctaattcttttaagagaggatggtataactttatcatttcacgggaagctgcataaatcgcaaaacatagatgattacttaacagtaatttatcattcttcatgttaaattcctcacaatatttatattcattactacacataatagcataagaattacattaagggaaattgaatgactgacaatttaattaaccataacttatatacatggaaactttatttataaccaaaatgtgtttgaggtgcattcttattatgaccgatatagatacttccactatattgtttagaccgactcatagatttattgagccaccttctcaatatggttattatgtacactaactttaaactgcggaaaactgttctttattttagtctaatcattcatttagagaattttaattgcgaatttaaattgagagcaatttaatttcaaaaaatttaattgacaacgctgattagattgattaaaattcaattgtgttaaatttaatttataggagtgtttgatgatgacagtatattttacagcagaagctacaacaaaaggcggaagagaaggtcatgtaacatctaatgatcttattattgatttggatttagctatgccaaaaccaaatcaagtatccgcggctacaaatccagaacaattatttgcggcaggctattcagcttgttatgacagtgctcttcatttagcagcccagagacaacgattaaaaatcgaatcagctgttaccggtaaagtaagtttattaaaagatgaaagtgataatggttataaaatcggagttgttctggaggtggaaattcaaggggtatctcaagagcaagcggaagaattaacacatgcagctcatcaagtatgtccatattctaaagctactcgcggaaatattgatgtacaaatcattacaacagcaatgtaagacgaaagatgccaagatcaataggtaatagaataaaaaaatttgattaaaacatataggtgaccagccttcaaataaggagtgagattgatgttaaagaaagtacaattagaaaaagcagctcaagaatttgcagaagcaaccgcgaacccaccctatctattcgaccttggacctgagaaaggacgagaagctgtagatgaggttcaatctgccccaattgataaactgccagttgatattgaagatgttatgatttcaggaggaccgagcggacaggtatcagtaagaataatgcgcccgcagaatgcgcctgcgcaccttcctgtcatcgtgtacattcatggggccggctgggtatttggtaatgagcatacacatgatcggctcatccgtgagctagcagtcggagcacaagctgctattgtctttccaaattacaccttatctccagaagcaaaatatccgacagccattgaagaaatctatgcagtagtgaagtgggcatctgaaaatggccgtgagaacggcatgattcccgagagtctaacaattgcaggtgatagtgttggaggcaatatggctgctgctgtcacgctaatggccaaagcacgaggtgacttgaatatccggcaacaattacttttctatccggtaacagacgcttctttcgatacggaatcctatcaccagtttgctgcaggatactttttacgcaaggacgcgatgatgtggttttgggatcagtacacaaccaattcgaacgagcgtgctgaaattacagcatcacctctgcgtgcaactgctgagcagcttcaagggcttccatctgcattgattatcacagctgaagctgatgtacttcgtgacgagggagaagcatatgccaataaacttcgtgaagctggtgtttcggtcactgccgtacgtttccaagctatcattcacgatttcgtgatgctcaacgccttagctaaaactgaagctgcgcgcggagcaattgatctcgccgcaacctggctgcgtaaagggttttaatccatttattgtttcgtcacatagagactgctgcaaataaataaaaaacaaacagatccactcaaataattgagtggatcgtatattggaataatggaacttttgatgagctttttaatcgggctggttattattttgttgttgagatgtccctaattgaaaagctaactccacaacaaactccgttttttcaccagttcaccctcttcatatccaaaaaacctttgttgattagttagcgtacaagttctcgttttctgctttggaccccatacagaaaataaaaagccagctctccttcgggagaagaactggcataacaaagcttcttgcttcttattttgctgtattgcccggaccttttaatttctcttcgttcttgcgtcaatgttttattattaggacacaaccaataaaataatgacgatcgagaatagcaacgctgcatttgcaaagcagtaagccctccagaatataaaagagctgcagtcattgctgctcggataatcccagcttattctgagtctgtatttcgagtagtcggtcaattaaatggatgtttttttcattccttttctgtttgttccattttccaccacagtgaatcttttggattttcaacagcttcttgaaactcagctttagaagcaactgttgggtaagaaccttttaaagatttacctgaagtatctttaaataaggttaacacaactattaagccaattaaactgactgccaataaatagaaacccggcgccaaattgtttcttgtcacatgggttaaccaagaagcaactaaaggtgttgttccgccaaaaatagaaactgataagttgaatgtccaggataatgtacgatatctaatgtcagtatggaacaacgtaggtaaagatcctggcatagtaccttcgtatacagataatacaatacctaacattaaaagtcctataaataagaatgttatattccccatattaagaaattgaaaagagataattgaaaatacaattcctaatactaatccaattgttataacttttttatttcctaatttatctcccagtttaccaaaagttaaagcgaacggtaccataataatcaatacaattgctgtaaccggtgtacttatattatcacttataccaaggttctcatctaaataagaaggcatataccctaataataggtaattggttatattgaaaaatgccacaaatacgatacataaaaagatatcttttttatatgttttaatgacttctaataaacctggttgttgttcttggttttcagagatgtcactttcaaagattggtgattcatctagatgacttctcaaatataaaccaaataatcctattggaatacttaagaagaaaggaattctccatccccaactattcatttgaacatcagataaagtccagaaaagtactgtaactaaaacagaagctactatataaccagataatgtgccgatttctaaaccgctgcctaaccttatacgtttattatctggagaagattctgcgatatataccattgccccagcgtactctccacccacagaaaagccttgcagaatacgggcaaagagtaataatataggggcccataccccaatctgatcataggtaggaagcacaccaattattaaagtagataaagccatcattaaaatagtaattgttaatactattttccgaccaaatttatcacccattttaccaaaaataattccgcctaccggtctaagtaagaaggcaattgcaaatgtagcaaaagtaaatattaactttaattcatcgttttgaactggactgaaaaagtttttactaataataactgccaaataagaatataaagcaaaatcaaaccattccatcgcgtttcctatccctgtagcaaacacgcttttcttcgctttttgaatgtctacaacgttaatttttttcttgttaaacttcatttaataatatcgactccttaattatcaaatccacattatacaagcgcgtaaacggtccgagcatgcagtcccagaatgtatagcgtaatgcttctctaaaagtccgggggtttctgtttcacctgatggagagctaacggcatagtggctgattggttcaactgtaccttaaaagactagactaatatccatatcagcgccaaataacattgtaaaccaggaaagaaggatgaaattaagtgttttcgctggtttccttaacttatttttgccgattgggctaaaaataatacaagaagcaacaaaaagagaaacagccaacagataataccagcctaagcggttagtgagatatccttgggttgtggttggtattttctgcagacgatttggagaaatgattccccttcatacagctctattgtgaatatgatcacaatcgaaaaaaaacttttatttcttcaaagtagcctaaacctttattttagatcttccattacgtcttccaatatgtttattataagattgaggtcgttcctaagaattatttactgattctatctttattaccccacaatcaggtgaaacaaaacactataaacgtagcatacctttttaaaacctgacaagcccaacggggtgatagaaaccaggctaaagccaagctagtcaatggatagaagaaatttttttgtttttcccaaggaataaccgtctgcgtttaatctagcccaattagaaagaaaaagagcaggagtaatcctgctctttcattcaaaactttaatttgtatgacgaatttcgtataccttttcaactttctttaccttagactacaacagaaataagtagcacagggtatgaaataatggttttatttaaacagtcaatcaccgacaattgaatttattgcatgacacctgacaaaatttttttatccagctggaaataaagtaacattttttaaggtaatggatttatttttgttcaatgattaaatgatccccaatgacaataaagactaataattactaaaatttcaggaaaccccaatattgcttatcttaattattgtttaactaattggtaattgcaacagtaaacttatacttatggaaagttataccaaccgaaaattttccgactcaagtctgtttaaccagttgtgaaccaatgaattaaatacatcggtttgttcgatttgcaggttgtgaccagccatatcaagtactgcaaaagttgcccttgggtaatcttcgagtagccgccacgcatcatggtatccgactacattgtcctgacgccctgtgataattagcgtgggataatcaagtttagatgaaatatcgaaggtaaacccatatccattttgacgaatgttgtttacgaattcataatttgtttgtttagatggaagtaaaatttcatcccgaaacctctcccattcagttttaccttgcacaatccccatagagcaaaattcattcgcctcctctgaagacaaatgtgatatcaagtcgctgtctctttttagaacagtcttctgcggtactaccctttcatcgaattcgggtatagttaatggtgccatcagcagtaatccacgaactgtttccttacgtgaacgaacgatacctctggcaatgtaccctccatatgaattaccgcaaacaataaactgttgatcaggaataatctcgtccaaaagacgcaatatcgcttctaaaacatcatcagagttctgaatagatggttgtggcttagaatgtcccatacctggtaagtctatgtatattctcttccaaccgcttcgtttctcgaataacggttccattgcatttaacatcacctgatggtcaagtgtccaaccatgcaacataacgatcggatatccatctccaattactttatggtaaatcgacatgtagttgttccccttccctgtaatcctaatgtttcgacatgaacatttaatcctttcatacatttatcacaattttaacaaacttttaactgaacttggtaagttgaacaagggttatacattgaatttcgacaatcgcaaactgtcatatgtgtccgtcatatcaaaagaatctgtttaatgtgttgtttagtgctttcgttactgcgactatcgacaaataagaaccaagcaaagtattgtccagatactttgagtattttgatcactttgaactttaggtaagtgggcagtttgtgggcagtagatcatttaaaaataagcgcaaaaaaataccaaggatctctctattacccttggtatcattgggatgcggcgagaggacttgaaccttcacgggttattcacccgctgggccctcaacctagtaaaaacctatcatgagtttcaaaagcttttattcaaagcatctgtttattttatttatacttattttcatcatttttcatgaattccgagcacaaactgggcacctattagagaccaaggaaatctacatttcaacaagaaatatctactcatcgccctgctgtaattagtttatttcagcttccctcgcgaataccggatcaatgctcagctttaagatagtcaaccaatttctccgcactgttcttaacatcttcttttgaaaggtgaagtgtaccatattgtgcaaaggcaggaagaaaacgcattcctatatagttagcagtgatttgaaacggtctgataagctcgctgatcgtgatattatattctccgcctgcttgataatcagattcctgtgcgcctaaggagatagctaagagtagttctttgccatgcaatttagtacctccagttccataagcccaaccatgtgttaacacatcatcttcccattgtttgagtaacgcgggactgctgtaccaatacattgggaactgaaaaacgatgcgctcatgatctaacaggagctgctgctctttttctacatcaatgataaaattaggatattcaccgtacaggtcatgaaccgtaatgtcattctcttgctttaaacgattcatccaggttttgttgacaacagacgtttccaaattagggtgtataacgataactaatgttttcatttgactgattatcctttcttcgccgattagttattattgcttttacgataatgaattgaattaattttaaaatatcaactttatttacacctattttatcctttttcgtgaattcagggcaaataattgggcaccgattacatttatagccaaaaaaagacttaaccttttaaaaaagattaagccttttcagtacctttatgcccctaccctattatctcgtgtctaaattctaatagctgataatataacaaggcctctttgttttcctccatgcttagcaatactttctctgccttttgcaaattggagtttgaggcattagtaactacctataatgatgaaaatatttgtgcgacgtcaactgtagatgacttactccaggtaagtgggcagtttgtggatagtagatcatttaaaaataagcacaaaaaataccaaaggcggttaaacccttggtattattgggatgcggccgagaggacttgaacctccacgggttattcacccactaggccctcaacctagcgcgtctgccattccgccacgaccgcgtgctatgaagctgtctttccactaagcatataagctagtgatgatgatcagcactttgaaaagaaagtgcgggtgaagggactcgaacccccacgtcgtaagacactagatcctaagtctagcgcgtctgccaattccgccacacccgcgtgacaagtggtgagccatgaaggactcgaaccttcgaccctctgattaaaagtcagatgctctaccaactgagctaatggctcgctctaaaagtgattcaaaatttttaaataaaatggctgggctagctggattcgaaccaacgcatgacggagtcaaagtccgttgccttaccgcttggctatagcccaacgaaggtaaatggtgacccgtacgggattcgaacccgtgttaccgccgtgaaagggcggtgtcttaaccgcttgaccaacgggccgtctggttgagaacttatctggcggagaaggagggatttgaaccctcgcgccgcttacgcgacctacacccttagcaggggcgcctcttcagccacttgagtacttctccataatggctccacaggcaggattcgaacctgcgaccgatcggttaacagccgatagctctaccactgagctactgtggaatgatcagactttctttattataaatgatgcgacatattgtgtcaataagcaacatttattttttttgagaaagcatcgttgtctctcaacgacttttataatttaacacagatcattgaaatgagtcaagcctttttaaaaaattcttttgatttttcctctgcactttccgcaggcatatctttccgggttcattgcccgcttctttatatactgttggccgcaggcctcgcatctatacatatatgttttcttttgtgtctttttggtttgcagcggcgtgcagaatcttggcgctccgactttctgaagcaggtctctgaaatccttgtctctgtgcttgtacccttttccctcaagatgaagatgataatggcacagctcgtgcttgatgatgcctaccagctcgctccgtccgtgttcgagcagatattttcggtttaattcgatgttatgggaagacagcatgtaccggccgcctgtcgttttcagccggtcattgaaaaaggcccggtgacggaacggctttccgaaatcctgtgcagagatgtcttccgtcagcttttgaagttgttcgttatccatatgtgcaccccgctttaaaaacattgaacgggacaattcaccgttcgcatacaatgtgttaaaaccgacctctaactaaaagctgaggaggaatgagccatgccgaattggctgatgaaacaaatgcaaaaagcgtttttagaaaaggacaattaccaaatcaaactgctgaaccagtgctggtatttctacagaaaaaaacactgctcgtaagcagtgcttttattttaccatagacagcgacactctgcctttttgcacgtccaccccttcgacccatacggtgacgatgtctccgaccgatacgacgtcgagaggatgtttgacgaattgattgctcagttttgagatgtgcacaagcccgtcctgcttgacgccgatatcgacgaaagcgccgaagtccacaacgttccggacggtgccctgcaattccattccttcctttaaatcctcaagctgcagaacgtcttttttcagcaaaggcttcggcacttcgtcacggggatctcgctccggccttgtcagctgcccgcaaatatccgcaagcgtaatctcccctataccgagctcctcagccgtttcagacagcggcagtgcgctgattttctcttttacgtccgcgcttccgatctgatccgcagtgagctgcagttttttgagcagcgcctttgtctctttatagctttccgggtgtatcccggtgcggtcgagcggctcccgtcctccgggcactctcaaaaagccgatgcactgttcatatgtttttgcgccgagacgcgggatatctttcagctctttgcggtttgtaaattttccgagctcttccctttttttgacgatattgccggcaacggttttggataacccggctacatattgaagcagcgcggctgatgctgtattgacattcaccccgacttggttgacgacggtctctacgacaaaacggagagattcgtttaaatgcttttggctgacatcatgctggtattgcccgacaccgacggatttaggatcaattttcacaagctcggccagcggatcctgcaacctccgcgcgatggagacggcgctgcgctcttcgacctgaaaatccggaaattcctcacgggcgatttctgacgcggaatacacgcttgctccggcctcattgacgatgacataataaatgtcccgctctgtttctttcagcacatcaacgacgaattgctctgtctcccgtgatgccgtgccgtttccgatcgccacaacctcgacttcgtaccgatccagcaattctttgattttttttcgggcttccgctgtctttttgacgggagcgtgcgggtaaatgacatcgattttcagcacttttcccgtctcatcaacgactgccagtttgcaccccgtgcggaaggccggatcgacgccgagcacgacttttcccttcatcggcggctgcagcaggagcttacgcaggttttcagcgaaaatatggatcgcctgcgcgtctgctttttctgacagttctttgcggatatcgcgttcaatagccggctggatcaggcgtttataactgtcctcaatggcttctttcagcgtttctttcacaggtgtttcacggtgtttgatgatttgcttttctaaataagcttttatctgatcggcgggcggttcgatcgcaatctttaaaatgccttctttttcaccgcggttcatcgcaagcactctgtgaggaacgaccttttggatcggctcttcgtactcgtagtacatctcatagacgtttttctcgtcatctgcggctgacttgcctgccgcggaagtgagaattccttttttatacgtttcctggcggatccactttctgaaatgaggatcatccgagatttgttcggctatgatgtgcttcgcgccttcaatggcttcctctcttgaagcgacttctttttctgcactgatatattgatcagcgacgtcgtgaaggcggttttctttcgggagagaaagaatatagtccgcaagcggttcaaggcctttgcttttggcgacggtggcttttgttttccgtttttgtttgaaggggcggtataaatcctcgacttcctgaagcttgaccgcttgctcgattttttgcttcagcccgtctgtcagcttgtcctgctcggagatcaatctgatgacttcttctttccgctgcgtcaggttttgtatgtattgccaccgctcggagattgcctgaatctgcacctcgtccattgagccggtctgctcttttcggtaccgcgcaataaacgggacggtattgccgtcttccagcaggcggatgacactttcgacatgtttttgggataacgctgtttcttcagcaatttgttttttcaaaagggctaacgtttccatatcacaaaagcctccatctcttctttctttctctagtgtatcaaaaaacggcggaacataaaaaaagcagccttacgataaaagctgcccgagaatataggtcaaatcatcacgtctggatgttgtgtacggatgaagtgattttgatatttcttctattgagtgtccctgctttaagcaggtgcggatatgcggaacctcaagcccatccgtgtagatgatgaatgtcgcccctttttcgtatgatgacgtatacgttttgtatctttgcggtttgcctgagaggtaacccgaaatcggcagcggatgaaaaacttcgcctgatggggagtgcaggaagaaacggacgttgccgatcgagcagtatgtcaattcccttttgatgaaattgatttttaagatggaggcagtcgcccctcttttgtttttcatcgcttgattgcagcgctcaatgatgctttccacatcctcatccgcatacgtttccacgatgtctttaatggctgacgaggattcattggcaagagatccgctgccgagaccgtccgctaccgcgcaaactaattcttcttcattcgccttcataaaaaagctgtcgccgcatatggacttgccttctttatttaattggtatacaagagtttgaacatgttcattttcttcaacctgaatcattacattagctccatggagggatctccaatcaaggcctctctcagttttttcaccgctttccgctgcaggcgcgagacgtgcatttgagatattccgagaatgtcccctgtttctttttggcttttattttgcacaaatgttagatcgataatctgtttttcgcggtcggacagcacatgaagcacgcttttgatcatcatctgctggttgacgcgttcgtatccttcctcctgcgacccgacgatatctaaaattgtgacggtgcttccgtccgcatccgcttcgatgctgtgatcgacagaaagcgcctgatagctttttcccatctccatcgtttcaagcacttcctcttctgacacatcgagaaaggctgcgatttcttcgactttcggcgaccgctgcgtctctgtcgtcagctgatccaccgccattttaatgcgcggcccgagttctttaatccgtctcgggacgtgtacgctccatgttttatctctgaggaagcgtttgatctcgccgatgatggtcggaatcgcaaatgcttcaaaggatttgccgacctcgggatcataccgtttaatggctccgagaagtccgatcatcccgacttggcggagatcttcgtgaaagctttttccttttgaatatttctttgccagcatttcgacgagattggtatacacctcgacgagtgtttcctgggcttctttattatcatgtgtttgaaagtcgcgtatgagccgatcaacttcatctttagttagtttcgtagtttttgatggttgtgccatgatcaactcgctccccatttaaatactttgtcatcgccacggttacgccagagttgctttgaactttgacttcatccatgagcgtttccattaaatacagaccgagccctccttctgacaattgatcgactgtgtgcgaaggtgtgtacggcccgagatcctgctgcttctgatcaaaatcaaagctgtctccctgatcggcgacaatgacctccagccgatcctcaaacacaccgaaccgcacggatacttctcccttattttcatctttgtatgcatgctggacagcgtttgtacaagcttcgctgacagcgatttttaaatcttcaatgtcatcataggtatagcccattctgctggcgactcctgataatgtaagcctgacgattcctacatattccggttcggccggaattttcatctctatataatcaactgatgtactcattgcacgccaccttctgactttgccgaaatgtcgatgatgtccttaagccccgtaatttcaaacagacggacgagccggtcggaaagattctcaagcttcagagagccgccttccttgctcaccgttttaaacacgcctacaaaaacacctaaacccgtactgtccatatagtttacatcttttaagcagattctcatgtccttcccctcgtttgccaggggcatcagcttttcacgaaccaccggagctgagtatacatcgatttctccagcgatattgatttgtatatctgaaagattctccttcatatctaccgttaaattcatcgtatcacctctgaaagttatccttactcgtgctaatggctttttacccgtgctgccgtttttttaaacctttcttttcaaaacaattaacgtaaaatcatcatgaagctgaaagtcctgaagtctcagcaggctgtcgtaaatatttttgaccatatcctgcgcggagcagtccatatgttcttccagcatgcgctgaatgtcgctgcgttctaagaaaccgttttcggtacggcattcggtgacgccgtcagaaaaaagaacgatcatgtctccttcgtccatgtgctgttcatattggctgtaatcaaaatcctgggaaattcccagcaccaatccttttgcctccagatcataaaactttttttctttttcagagtagtagaagcccggttcatgccccgcagaagcatatgtaaattggtgatttttcgtattgtagtttgcgtaaaacatggtgataaacatgcttgagtccacgttctgttctacaacgcggttaagatttttcagcacttgggaggggtgaatgccgatctccggaagagagtccatggcatacttgatcatcgacatgcacaatgcggcgggtattccttttccgatgacatcggctatcgcgatgttaatcgattccttgtctttgacaaagtgataatagtccccgctcatttgcttggcggggacgctgatcgccccgatatccagttcttcttcttcaggaatttttgtgcccagcagcgtctgctgaacatttgcggcaatttcaatttctgaacgaagctcctgctggatatctctcagactttggtgttcctgataagccatcccgtagccaatcatgacttctattaaaaaatccagcgaatgaaaaacatcttccggcagatccggatacagttcctttaccacttttcggtggatgctgatgatctcctccggaggaacctgatgttcaatcgtttttcggctgaatttttgggcttgatataaagatgtttctgttaattcggctatatatcggctaagcagctgatgataccgctgctctataacctccctgaaatccacgttctaacctcctaccgaagccattttacggcttgaatctctgttccttcctctgcaacagattgcaggctgaattcgtccatcagccttttcacgcccggaagtcccgctcccagtccgcctgacgttgaaaagccgtcttccatcactttacggatgtcggggattccgggtcctttgtcttctgctataattttaaggccttttttccctctgtcgtttacttgttctatgctgacctggcccttgcctgcatataagtaaatgtttctggccaattctgagatagccgtcgtgattctggcctggtccaccgtgccgaagcctaattccttcgcaacgttgcggccaagctgtctggcggctacgatatcccattctgtcatgattttcacacaggattggtcgttcatcgctattcccccaattcccgcttcaatgtctcaagcccttgctctaaatcgagcgccgtttcaatttcctcaagtgagattccgagttcaatcaatgtgaccgccacagccggctgaattcccgtcaatacgacctttgcgcccatcaatttagacatggtgatgacatcgccgagcactttcgcgataaatgaatcaatcatgtcaacggatgtcaggtcaatgacgaccccgtttgcgccggtttcatagattttgttcagcagatcttcttgaaaatgcaaagctgtctggtcgtcaagctcccattggatggataccaataagcagttatacagtttcaggatcgggatttttggatgtctcacaatgttattcccccaatgaaacgatttttcgatttgtcatttcaagcgctgtttgaattcctttttgaagggtattcttcgtaataacctgcgacaaatcaattcccagattaacgatcgtctgcgcgatttccggacggattccgacgagcagacatttcgcgccgacaagccgcaccgcttctgatgcctgaataatatggtgcgccaccatcgtatcaacgaccggcacgcccgtgatatcaattaatacaacctgtgaacggtgctttacgacgccgtttaacagattttccataatatgctttgcacgctccgtatcaatcgtcccgacaagcggcatgaccgttacatgctcaaataccgggatcagcggagccgacaattcctgaagcgcgattttttgcaaagtaaccgttttttcccaggagatagaatactgatttaagatttccgtgttgatcggattgaaaaagctgtctatttccaaaatcaaatctgctctgtcctgatcggccatattaaggtcgaccatcgtttcgtaaagcagtttccaaaactctgacagggtggctgaaagaagtttcagcgacaggccgagctgaacggcgcgcagtgcgagttcactgatctgctcttcggcagcctcgtcattttttgtcgataataaaagaatgtctatataatctttacaaatattttcacatatgtgattcgtaagctgatagtcttcctgattgcctacttcttttagtttggctgtccaagtatcaagcagttcatcatgctgatcaataatgaactgatacactttctgattcgacatgggtttcactgacctcccgacacaaaacaacaaattttgtttgattatttctttattatagcgcttatgtttttcgaaaacaaaaaaagttgctctatatgagcaaccaaaatatgactaaaaatcaatgagtgccaaactgatttgcagggcttcatcaaccttatccatcatttcatcatccagatgagttattttatccgttaatctttgcttgtcaatcgtccgaatttgctccagcaaaataacggaatctctttcaaaaccgtagcgttttgcatcaatttcgacgtgggttggtaatttcgctttctgtatttgggctgttatggctgcaacaatagcagtcgggctaaagcgatttccgatatcattctggatcactaaaaccgggcgtacgccgccttgctctgagccaacaacaggagataaatcagcaaaataaacatcgccgcgctttacaatcaaaatgattatcctccgctgactaagcgctcaacggtcgtttctgcttcgcactcagcatagtgagcctcagaagagatattcaagttgattttcgccatttccatatacccgcgtctcatcaaatcacggttatggcgagttgtccgttcgctgacatacgctctcactgcttgtgatatcagttcgtttctgcttcgtttctcccgcatcgctacaccatccaattcagctactaagttttcgggcaagctgattttcatttcggttcttgcgctggattcagacaaaaaacatacacctccaccaaacttacggatacgaccaattcatccatccagacataatgataccattattcaaacgtcaagcaaagctgttttataaattctctttttccggatgacggctacttgtttgtattatcttgcagtaaaggatttcttacttccattatactctcattttccaaaaacatacggggaacgcgggaactaatggtacaagggacctcgtaattaatcgtctcaagccgccctgcgatttcatccatcgtgatcgtttcttccttctggctgccgatcagggtgactttggtgcccggcggataagattgatctaattcgaccatcaattgatccatgcagattcttcccgcgatgttcatccgtttgccgccgatcagcacagacgtgccgctcagcttgcggagccacccgtctgcatagccgatgggaaccgttccgatccattgatccttctctgccgtatatgttgcgccgtagctgacgctttcccctttgcggatctttttcacatgggataacacagagtgcagcgcaaaagccggctttaattgaaacggaatttcgctttggatgtcagcagaaggacgaagcccgtacatactgatgccgaaacgaaccgcgttaaagaagccttttttaaggcgaagtccggcggcgctgttcgcgcagtgcaccatcaattcttttaaagggagcggagcgatcaatgttttaaagcggtcaaactggaagaggaaataatctctgtttttctcatccgcggtagcaaagtgggtgaaaacgcctttacagactaaaccgggattttggctgaggatttttaacacgctttggatttcttcctccgttttgactccgagtctgttcatgccggtatcgactttcagatgaaacggcaatgtggcacctccgaggtggcgcgcagcttcctgaagccattcaacagaatatcccgtgagtgttacgtcatattcggcagctgcttgtacatattcgggcggcacggcgccaagcacaagaatcggcgctgtaatgccccgttttctcaatgaaatcgcttcatccagtatggctacggcaagacaagaggcacccgcttcaagcgcggctttcccaacttccaaatctccgtggccgtaagcgttcgcctttacaaccgccatgagatggacgttttgcccgatgtgttttttcatatgcgtgacattttctttaatcgcggacaggttgatttccgcccacgtttctctgtaaaaggatgctgtgttcattcgatacacttcctagcattattttcaattcatattgttattatcatactaaaattattctgcaaagtgaaatggaatcaaaaaagagaccgacagcggcggcctcttttttgacattattttgacgactgtccctgcatgcttttggcggcggccaccatttcatcctttgtcagatcctgtgatgacagaagataatccactccgtcatatgtccacgttaaagacgtatcagataatgcggccaccgtgaagccgagattaaccggttcgcctttcagcgtgacggcagaggcggcttttgcgatatgggctttttcttgaataagggtgaaggatttttctccgccgtaagtcatgacgatccgtttgccgtccgccgttgaaatatctttctcttcaagctttttgacgccggccggcacttgaagcggtgttttgaccgcaaatgaatcagacggcttggcgcttgtggcgacgtccatctgggaaagcgtcatatttttcttctcgtcaaaagagtctttatcaaacggcttgttgaattcaaagcttttgaattcgacttttaccatcactttccggtctgtatccatgactttgacgagcgaagggctcatgtcctttttgttgaaagtgatttcctgagtcggcagcattttgttgtgctgatagtttgtttttgtttcaaacgtgtactttttatctttggcggaatagacggcgtctttgtcatgctgcacgtcctttacaagtgactcaaacaaatatacttggctgctgttattcggccagtcgctttggaacctgaagctcttatttaaagacggcgtaaggacaaagactccgttggcgttccgtaaaatgacttggttttggtcttttttcggattttccagatagacccggtacagggaaggttttttatgccagatttccacattgtatacttgcggatcactccccgtctgaatggtcattttggctttcgctttgtacgaggtgtattctttcgccttcttatctaaaccgttcacgatatcttcctgtgatttttggccgcaggccgaaagaataaggacggcaagcagtcccgttaaaagcaaaacaaagctttttctcaccttttttcaaccccttcttctcaattgatgtaaagggaagaaatcgcttgtttgactttaacggtacgccctgaacggacggacgcgtaccataaaagcctcaaacaacttgtctcccttaatgcactatcaaatatatgaaggggtttcggctaatatgcagactagcgtgacaacctttcaatcacgacctgtgccgcggcgtattcttttgtatgggtaatggagacgtgaaccgccgcgccgtccagcttggcgcaggtcagcaccggcttgcccgccgtgtcgtttccggtttcgatatcctgaaagctgagctctttgccgatacccgttccgtatgctttcgaaaaggcttcttttgccgcaaatcttcccgcgagaaattcaattttccttttgtccgacagcaatgtaaaacgggcgtattcagcctccgtcaatattctttgcggaaacctcgcctgccggctgagcatgttttcaattctgtgcagttcaacgatgtcgattccgattccgaaaatcatgtgaattcctcctaaaagtccgtactaaaaaacggtttatgtcataaacgtgttactatatatgtaacaaatcagatgcaaaggggcttgcgatgtttatacgtacggaaaatttccagacttttatcagacgttatccggccgtcagctgtatcttggcgctgcaggcgttcttgtggctgtttttcagtatgccgcttcattccgtcatgatgtggtcagatgcagtgaccggctataattacggcgtttcctcgggagaatggtggcggctggtgacaccgatgtttttacatgcgaatttcactcaccttttgtttaactccatgtctctctttttattcgcgcccccgctggagcagatgctcggaaaagtccgttttttgattgtgtacatcgcatcgggcattatcggcaatatcggcacatatcttgccgaaccgcttgattatgtgcatgtcggcgcatccggcgcgattttcggacttttcggcgtgtatgtgtttctgactgttttccgcaaggagctgatcggccgggaccagtcgaaaatgattatgaccctgcttatcatcgcggtactgtcgacgtttatcaattctaatattaacattatggcgcatttgttcggactggcaggcggatttttgctttcctttttatgcgtgcagcaaaaaaagcggcggtattaaccgtccgctttttcatatgaataccagcgcccgatgcgttcggcatcttcctcgctgacatccttcagcatgacatgctccatgtggtgagctgatttcactgcggtagccacagatgcgagccgccttcttttttgcagaaaggagcggctgacttcaaacatctgcattcttcttctcagcataatcgtggtcgtcttcccgatcagccgtgtggtgagctgcagccggcctccgtttaagcaccatgacgcgctcttaaatgaggcgtagcccagcaccagttcgacgggaagcacaaggagcgatgcatacccccacggtttaaacagaatacaaagcggaatgatcacgaaaaccgagaagataacggagcggaataaataccggcgcagcgcccttttcggcaaatgattcctattttcttccagtacgtaatccggtgtgaaaccgttcagcatcacaccgagctttgatttgcggatgatcggaaacagaatcgtctgagctccttctttctcattccccgcactgccggcgctgacaatcgcaaccgtcgcgtatccgaataactgcctgatcacattttctttaattttaatggcttggattttacggagcgggatggtcacttgatgtttttcaataattcctctcgtaatgaccaattcgtgttcctttttttctatcttaaagttggcatgcttgatcatcataccggcgatgcttaacagccaggcgatgaacaatcctataaaaatgatcacggcgtatatgccgatgctcgcatgcttgagaaaagaaaacctgtcgtagaaccagtccatcggaagtacttcatcaagctgagaaaagagggcgaataccgctgagatgatgacaccgatccccccggatgttgaggcggccataagcagctcacccacagacaggcggtaaacggattgcacatcttccccgcgcatcggctcctgctccgctgcggtctcccctcgttcttcttgctccgctttttgctgaaaaacagccgctctgatccgttccgcctcttccacagtaatggcggataagacggcctcggcgtttttcccgtcgccggccgtttcgatttgaagcttaacaagcttaaaaagctgctgaacgatgccggcactcgtattcattgattgaatccggtcaatggagatgtatctctttttcgtaaaaaacaagccttcttcaattctgaattctccgtcctcaatccggtatgtaaattttctccactcgatcacacttgccgtaatcagccagataagcaggacagcgagcgcaatgcctccgtaaaagcggatgaagtggttggaattaacaatatagacgagaaaaaatggcagaataatgtttttaatggtttcgataataatatggaataagttcaaaatcacggccgccgggtgcagacgtttcggttcagacatcatcttccgtcacccttgccagacgggaaatggaatccctcagccggtcagcttcctccatatcaagcgccggaatggaatgaacggttgccgccgtagagattttgactgaggccaggcggtaccttctgaggagcgggccttgtgaagtatctacgtgctgcaccctcaccatcggcacaatgacccgtttgactataaaaatgccggattgaatatcaatttcattttcatggacctcatagcgccagatcctgtgcctgattttcggtatggcatagacggatatcactgaaccgatgacccaaatgatgccgaggactccggtgatccaatacggccaatggaagaaatggcttaaaacagctgctgctataacggccagaagacagaaggcggacaggatgatttcctgaagacgccagacttttaagccgcttggactgattcgattttttggctgtgctctcaacatacctacctcccattttttatcatacatacaaatacggctgatttgcaaaaaagattcactttccggcatatcgaaaaaaagcggaccccgaaaaagggtccgcttcctgtgttttagtatgattttttctggcgtctgtcacctgaagaacggcggtcgcttgagcgttttttatcgtaggaagaacggttgttgtttttccctttgccgccgcggtagccgccgccttggccgtctctgcgcttagaagtacgctggtttttatagcgtttgctgaccatcggcgcttcatcagtgaggcgtacaggcgtgctgtccggctcttttgtcgccattttaatggctgcagccacaactgtcactgcatcatgatcttctaacaattccgcagctgccgtcatgtagaagttcaggttgttttcgctgatcgccgtgcgcagacggtcaaccgtcacctgctgctgaccttctaatgcttcgtcaagcgtcggctctttcatgcggtccattttgcgttttgtcgtttgttcgatcgcgcgaagcatgtttttctcacgcggtgtgataaacgtcatcgccatacccgtttttcctgcgcgtcccgttcttccgatacggtgaacgtaactttcaggatcttgaggcacgtcaaagttgtatacgtgggtaacacctgagatatcaagtccgcgggcagcaacgtcagtcgctacaagcacttcgatcgcaccttctttaaacttgcggagcgctaccatacgcttcgcctgcgttaagtcgccgtgaattccttcagccgcatatccgcgaaggttcagcgcttccgtcaattcgtcaacacggcgttttgtacggccgaatacaatcgcaagttccggagactgaatgtcaagaagacgagtcagcgtatcgaattttttgcgctcctgcacttccaagtagaactgctgaatgttggacacagtcatttctttcgcttttacttttacgtgttccggctcagtcatgaaacgctctgcgatccgtttgatcggcgcaggcattgttgctgagaataagagcgtttggtggtcgctcggcacgtttgagagaatggattcaatatcatcaatgaatcccatgttcagcatttcatcagcctcgtccatgacaaccgtgttcacgttgtttaaacggatcgtgcggcggttgatatggtcaagaagacgccccggcgtacctacaatgatatgcgggtttttcttcaatgcgcggatctgacgtccgatatcctgaccgccgtaaataggcagcactttcgcacgcttatcttgtccgattttatataactcttcagatacttgaatggctaattcacgggttggcgcgattacgattgcttgaatattaggagactcggggttcattttttcaacaaggggtataccgaacgcagctgttttacctgtacctgtttgcgcttgtccgatgacatctttatttaaaagtccgagcggaatcgtttgtgcctgaatcggtgttgcttcttcaaatcccatacgattgattgatttcatgagatcagaacttaattggaaatcttgaaacgttatagtcaaattattcaaactccttctgattgctgtttcagtaatgtcgtgatttaccactaaaaactgccctttcatccaaaggacaggatcatacgtatacaaagcccgaattactttacgtttaatcttaccattacactatgtgtttttcaataaggcgagatggtcaggcggccggaagcggcctgaccggattcttcccgcaaacgaggccggaccccgcgccggacgggatttcccagccggcggcctttctttttcatacggacagaattatttcaccctgaattagtttcttcatttttgtatatttttataatgctgatcagtattttttcagttcttctctaataaatctttaacgatttcttcgagcttcatacctctcgatgctttaaacagaaggagatcgccggaagcggccatatcctgtatggcgtgaagcagttcttttttgtcgagataatggctgacgcgcccttcttcaaaatgccggcgcgctccgtctgcgatgaatgcgccgagtgtgccgtaagtaaatacatggtcaatttccgccggattgatcgcagctccgcattcttcgtggaatgctttttcttcatcaccgagttcaagcatatcaccgagcacgagcattttcttccgatagcctttcatcgtttcgattaattcgaccgccgctttcattgacgtcgggctcgcattatacgcgtcgtttacgatcgagatgccgttttccgttttaaccagttccaatctcatccccgtcaccttcaggcggctcagtcccagagcggcattttccggcgtaatgccgaaatagatgccggcggcgtatgcggccatggcattcatcacattatgtctgccgagaaccggaataaagaaagaacgttcgatcccgtcgatattgaagtacgtgccttcttccgcctgttttatttctttcaggcggagatcattgacagcgcctgcgccgtatgtcgttgtccggcaagtgtacgccttttcgcggagcaacggctcatccccgaaataaaacagaacgccgtcttcccgaagtccgtttataatttcaagtttcgcctccgcaattccttctcttgagcctaaatcctgcatgtgggattcgccgatattggtaatgacggcagcttccggttcagcaagacggctcagaaaatcaatttcgcctctcgcgctcattcccatttctaaaacggcgatttctgtatcttcaggcatggcaagcacggtcagcggcaggccgatatggttgttgaaattgccggcggttttgtgaacacggtactgagtgctgagaacggcgtgaagcatgtctttcgttgtcgtttttccgttgctcccggtcaccccgatgacccgtgtgccgagttctttcaaataagctttcgccaatgtctgcagcgcctccagcgtgtcatcgacaaggatgacggcacgctcttccggcggattcggttcagagcggtcccacaacaccgcggaaacgcctttttcgaatgcttgcggcacaaaggtatggccgttaaaatgctcgccttttaaaggaatgaacagctgatttttttccaaagtccgcgtatcggttgcggcgccctcaatcattgtttgttcaaatacaggatttgtcagtgtgcctttgaccatgtcggcgattcgttttacagttcgctttatcaaaggtggcacctcgctttctgaaaatgttgtctgttacgggaaaagacactgccccttcaggcagtgtccgtcttcattaaaatgtatgtttaatcagctgtttttcggcatggcgttcttttgccagctcaaccagctgttcgatcagatcactgtaatctacgcctgcttctttccaaagcagcgggaacatgctgaatggcgtaaagcccggcattgtgttcacttcgttaatgagcacttgaccgtcattggtcaggaagaaatcggcgcggacaaggcctgatccgtcaatcgctttgaaggctttaatcgccatctcgctgatttccgcatattgttcatccgtcacttgcgcgggaatcattaaatccgtgtcgccgtcttcatatttcgctttgtaatcgtaaaagtcggttttcggcgtgatttcaccgacggcggaacatttcggttcgtcatttccgagtacgccgatttcgatttctctgccggcgattccttcttccaccacaattttccggtcatactcaaaagccagttcgaaggctttttcaagctcttcgcgatttcggcatttgctgattccgacgcttgacccgaggttcgccggtttgacgaagcacggatatcccagctcctcttcaacctgctgtaagcagctgtccggcgtctgtttccagtccttttttaagaaagcggcgtacttcgcctgcggaagccccgcttgagcgaacaaatgcttcatgatgactttatccatgccggctgatgatgcaagcactccgttgccgacataaggaacgttcagcaattccagcagtccctgaatggtgccgtcttcaccgttcggtccgtgcagaagcggaaatacgacatcgatctgcgccttttcgtcaggcgacgcttcaggaaacatttcccggttcaatgctgatagagcgaaactttcaccgttttgttccagctgaagcattttcacgttggaaaccggctcagtcagcagcgggcctctttgccattctcctttttcagtgatgtaaatcggatgtatatcaaacttctcagtattaagcgcttttgttacagctaatgctgtctgcagcgatacattgtgttcggctgactttccgccgtacaccaatcctagacttgttttcaatggatattccccccacaacaattcatctttactatcttatcactttcctcagaaaatgatctaattatttttgggcattctgaatatgaaagcatttgtatgtaattcctttttattttatattaaaatggcatggaaaaggagatgtgtcatatgaaaaaaatcagtacaacagaacaatttaatgaacttattcaatccgacaaggaaatcatcgtgaaatttttcgctgattggtgccctgactgcacgcgcatgaatatgttcatcggcgatattttggaagaatataatcaaaatgattggtatgagctgaacagagacgagctccctgagcttgccgacaaatatcaggtaatgggcataccgagccttctgatctttaaaaacggcgaaaagaaagcgcatcttcacagcgcaaacgcgaaaacgcccgaagaagtcacagagtttttatcacagcatatttaattcgtttcacgatctttgtttatgacttcaggctctacatgaacatggacatgagtcacatcatgttcatgttttattgcatattcgacttcatcggctacttcatggccttctttcacagacagtcccggatctaccgtaatgaccatttccacatgaaccgtgctccccaaataccttgctttcacatccttcagcctgctgacctcttttatttctttcactgtgtgtttatacggctccaaatctttcagatcaaacccgtccgttaatgagtgggaagcatctttgaagatgtcccatgccgtcttacagatgataattccgatcagaaaagcaatgaccggatcaatccacggcagatgaagccgggccgttaagacgcctatcaacgccccaatactgacataggcgtcagaacggctgtctttcgccgccgcatgaagcgcagaacttttaacccgatccgcaagacggctgttatatacatacatgccgtacatgacaatcgcgcttcctagcgccgtccatgccgcaatgaagctcggctcggcctccgttccgctgacaatcgcctttgctcctccgatcagcacttcaataccgaccgccatcataataaaagacgcaattaatgaagaaattgtttcagcccgataatgtccgtaggcatgatcactgtccgcggggcgctgggaaatccggagcccgatcagcacagccagtgatgcgacaatatccgtagcattatttaacccgtccgcactgagcgcttcggaatgataaataagaccgatcaccagtttgacggcggcaaggataaggtacgcggcgatattaagaatcgcgcctttttcgccccgttttaagtttgccgtttgatcattcatgtaaggactcctccattctcattcatagtatggatggaaaagcggaaaaatagcagctttgatctgaccaaatgcaatattcgacagcattattccccgggaaactatttgtcgaaaaattggcggtatttttcctttacatatgaatatgtccattgtataatttcattaactgataatgattctcaatatcaattgattaggagggtaatcatgaggtcttctcctcagctcagatcatcagttgaaggacgaaaaaaacatctgatccatttgctgatcaataacggaatatacaaaaagtcggaacggcatttatatgaattatcgctcggagaattagaaagcgaatacaaatatgtaaggaaggtgcgggctcatggcgaaacgtaaaataaaaacatacgaacagctgataaaagaaaacaaggcggccattatgaataatcaaaagctgatgaatgtgatctatgacagaattgaccgcaagcatcaaaaactgctccggcacaacagccatacataaaaagagcctttttcaggctcttttttttattgctcaaaggcttccgccgctaatttgccgatgaccgcatcgtccatcggcggattgtgaaggccggcccgggcatcccgataataccgctgaagcggattatttcgctccaggctttttgcgccggtgattctcattgctttgtcaacaacagaaaggacggcatttgtcacaatatgttttgccgcgccgagctcgcttttgatgaaagggcggcgtttcggatcatcatacatttgcgccgccgtgaagagaaactgtctcgcttttaacaattcaagctccatttccccgacacgctgctgaacggccggcacgtctttaatcggtccgttcaggctgttcggcgaatattcagatgcaaaccggacggcatagtcccttgccgcttgagcgatgcccagataagcagcgggaatgtgaagcagccagccattcactttcgccgctctcggcccgctgataagctccacaagccgctcgtcactgaccgtgacatgatctaaaaggagatcatggcttccggtcgccttcatggcaatcatatcccatgtttcttcgactgaaacgcctgcctgatctttatgaatgagaaaaacaccggtcgtttgtttttcttcaatccatgccgtcacaagcatataatccaaagtcagtgaaagggttgtaaaggtttttcggccgttcagcacccattttccgtcttttttgacagcggaagtgccgggtcttcctcccctcgtcggactgccggtctgccgttccgtcgctgccctgttcaggacggctccctttttcacctcttttgtgataaatgaaaagacaccttcatcccagctgtttccttctccgagctcacccatgacggataaatgccagccgattccgagagcgacggccgcgtctccccgcgccagccgttcctgaaacagcaccatctcataaacggaaatgcctgcaccgccgaatgcctcaggtaccgttaacgccgtatatcccgcgtcgcgcagtctttgaattttctccgcgggaaaacggcccgcctcatcatcaagcgcggctgttttttgaaattcgtctgcaagcaggccgattttttccatccattcccgctgccgttcattctgtatccataaagacactggaatccccccattataattccgataaagttaataagtattatagagattcaagtctcgtttcgcaactgtgaggctgtacaaaaaaacgcgctattccatagaatagcgcgttcagactgcttccgggccgcggtcctgcttgagcccgagataaatcagcatatatgtgagataacccatcgtcatcacaagcccgccaaagaaaaagcttgaaaaaatcggctcttcaaacgcggtaaccgccgcaagcacgatccagcttgcatacaggtagatgatgaaataacggaatcccgtcttcattttatataagagaaacagccccactgtagaaaacaaacccagcgcaagcctgaaataaacaagatgttcgaattgaaacatgaatgacacaaaggaaaaaccaagcaataacacaatcggtaatgcggtaataaaatttctcaagtgagcacctccgtcattacctttattataaatcaaaatagcataaattattgatttatcgtgatctttttcacaaaaatgtcattcctttactttatacccgaatatcgcgtttgcaaaagctccaccaagcgacggctaagaagaatacgatatggataatgataatgcctgcggaaaataacggcgtcattcccgcaaacagcggcttcgccccgctcatatattgcgtcaggtcagtatttgcgaacagcagaaaactaccccatttgttttggaagagcgacataatcgtcacaagtgattttgcgccgtacagcacgataaatgacaaaatgacggccgttgcgctgtttcggaatacagaagaacacaacaagccaaagcatgccatcgcaaacgcctcgacccagttcgtgccgattactttcagggtgttcacaagaagcgtccctgattcagatgtcaccgacactccgaagaaagccatgccgaacagcagagacagaatatagtacgccgcatacaggtacaagctgaccaaaaatacggtaatgagtttagatacaaaaatccgctcccgctttaccgggcggattaacaaaaatttgatcgttttcttatcaaattcagcggaaatgatcgttgccgcgatcacgatcgttaatgcctcaagcagaatattcagcccgggggcgtacgccatatagccgatgaaattctcatccgttccggaactgatgacaagccgtttaatgacaagcgccataataaattggagaacggccatcagaatcagcgccactaatgagacttttcggttaaagagtttcatatgctcattcgctgtcaatttaaacattcgtcttcccctcctcttgaagcgccgtcgtcactttcatgaattcatcctccagcgattccgcatacggcatgatggaatacacgagaaagtcttgtccgacgagcgcacggtttaatgccgggatgtccttcttcgctacggtgacggtaatgctcccgccgtttttctccggaacgaattgctgctgggacagccattcgaaggcttcgtcagccggctgaatgtcgaggatggctttttcttctttttccgcagcgccgcgcagaacaacctctgttttgatctcacctttttgaatgatgatgacacggtcgcaaaggtcctccacttcacgcaataaatgcgtcgcaaaaaggatgctcgtcccttcaagctccgcgagttcctttaagtgatcgcggaaatccttcattccgccgggatcaagcccgtttgtcggttcatctaaaatgagcagattcggacggtgaagaatggcctgtgcaatcccgagacgctgacgcatgccaagggaatacgttttaactttgtcatgaacggcatttgtgagcccgacccgctcgatgacttcctgaagcctgtcttctgtgatgtttttgtgcatgttggcaaagtgcttcagattttcccaccccgtcaggtacgggtagaattcaggattttccacgatcgctccgacggattcaagcgctttttcgaaatcagcatcgtgctgaaagccgttaattgtaatcgtgccgctgtttttctttaaaaggccgacgatgattcggataagtgtggtttttcccgacccgttcggaccgagcaaaccgatgatctcgccctgcctgacatccatgctgatgttttttaaaatgtgctttttgcctattgttttgtcaaggccttcaatatgtaaaatcggctcagtcatacagccttcctcctttttcacaaaaaataaacagtgcccgtacataggcactgtctgcattataacattagtcatatattcgtgaagagccggagccgtcgttatgtcttatccgggaccggtccgtttttttccttctcctcattattgacgacatccagaatatcaagcaggaacacaaaaatcggaattccgataatcaagccccaaatgccgaagaaatgttctgagaaaatcagaaccgtaaaggtaaaaaagatcggcagttccgtttttgctgacatcagtttcggattaaggaagtacgtctcaatcgcatgaatgacgaaaatgaccagcacgatgtagatgacgtacgcagcgccgcccgtcgtatacgcgatgatgctgagcggaatgagcgaaatcaccacacccgccacgggaatgagcccgaggaaaaagaccatgatggacaggccgaacagctgcggaaaatgcagaatcgccaatgcgatcaaggtgaggatacagttcaccagcgcgataataaattgggcttcaagcactttgccgaatgttctcgcaaatttgctgccgaaataagcaagttcgtagtaaaaaacagacagcttgctgtgctgaaattttttcataaactccgtgagccgctttttctcgaacaggaaaaacatgctgagaatcagtgacatcacgacctgcaaaccgaaagtgctgatatcggccaagtatgtatacagtacattaaaaccttcttttacataggaaccgatattgatatcgccgaacacgctcgatatctcatcataaaacggaatgacatcgggatgatacgcgatgtgcttgatctgcttaatcagctgttcaatctgcttggcaacaatcgggtaaaagacaaagcctccgacagtcgccccgacagccagcgcaatatataaaatggtgatgaccaccctctggctgatccggaaaaaatggttcaacacgtgccggatgacagtctccagccgatccatcagaaaagtaaaaataaacgtaagcaaaatcaaattaatcatacttcggaatacaactaacaccccagtcaaaacaagaaaaacggaaaaacgtctgacacccggatgctgaaaaaatttaaaaatagccgccatttatacactcctgctaggacaaaaagcccttagatttcatctttcactctctaattgtaaattatataacaaaatgacgctaaggtctttgtccacctcctaataaatttaaacaaatttatcttttttactcatggcggccgaaaaaaagaacggcatgccggatgcatgccgttcctttccttttataccgccgtttttatttcttttacggcctgtgtgcttttcgcttcgtcaaactcattttcgctcttggctacgatgatggtggcgattccgtttccgatcaggttgacgatcgcccttccttcactcataaagcggtcaacgccgaggagcagcgccagtccctccagcggaataacctgaagcgccgataaagtggaggcgagcacgataaatccgcttccggttacacccgccgcgccttttgatgtcagcatcagcacgagaatgatcgtaacctgctggccgatggtaagatcaacgccgaacacctgcgccagaaaaaccgtcgccatggacagatagatcgaggtgccgtccaggttaaaagaatatcccgtcggaatgacaaggccgacaaccgatttggaacagccgtaacgttccattttatccatcatccgcggaaggacggactcagaagagcttgtgccgagaacgatgagcagttcatctttaataaaacggagatagttccacaagctgaaaccgaatagtttgcaaatgatattcaaagcgacaaatacaaacaggaacatcgtaacgtatacagacagcatcagactcgccagcggcttgatggaatcaaggccgaagtgcccgatcgtataggccatggccccgaatgcgccgatcggcgccgcgcgcatgatgtagccgatgattttgaaaaaaacgtgcgacagtttatcaaagaaatcaataatgcttttgcctctttcaccgagcgccgccaggccgacaccgaataaaacagaaaagaataagacctgaagaatgtcgccttttgcgaaagcgtcaaccatatttgacggaacgatgtgagtgataaattcaatccagtcaatcccctgtcccccgttttgggtgtactgagagacatcccctttttcaagcttgctgtaatcaaggccctcaccgggtttcatgatattgacgaccagaagcccgataataagggcgatggtggtcacgacttcaaaataaataaatgcttttcccccgactttgccgacttttttcatgtctcccatcttggcgatgccaagcacgatcgtcaggaatatgatcggtgcgataatcatttttaccgcattgataaatgtatcgccgagcggcttcatctgcttcccggcctcaggccaaacgagtccgacaatgacgccgatgatcaccgccgtgatgacctgcaccgtaagatttttgaaaattttcatccctactcccccttgcctctcgatgcgtctatacaaagatgatagcgttttcatacgaagaggggaagcttatgatcataacggacattttggtctttttggtctcggctagcggacgaatttgtagcggttaaccggccgtcccactcccccgtattgaatgtcgagcttaatctggccgtccttctcaagaaaatcaagataacgccgcgccgtcacccttgcgattccgagcgctttggcggcttcttcagctgaaagcggctccgtctgctgtttcatataggtcaaaatttcattcatcgtaaaatggtttaaccccttcggcagatcccgggacggattttgcggaattttcagcagcatgtcaagctgctcttgcgacatcgtgtcatgctcttcaattttccgtttatattgtttatagttttcgagcgcctgtctcatccgctccagcttaaacggcttcaaaatatagtcggccgcaccgttttgcagcataagctggattgtttctttgtcttttgcggccgagacgatgatgacgtccacttcgagcttttgttttctgatttcctggagcgttttaattccgtcttttttcggcatgtatacgtctaataccacgagcccgggccgcagatcttttataagcctgattccctcgtctccgtcagcggccgtggcgatgacgctgaaccctgaaacaccggtgataaattctttattcacctcctgcaccatcggatcatcttcaataagcagcaccttgatgtccatcgaatgattcctcccccttcatcggaaataatatagaaaatgccgttccctgtccctgccgtgtgtcgacttcaatcacgcccatccctttgtcgacgatttgtttgacgaggtacaagccgtatcccgttcctcccgttttattgacggtaaaccctttgtcataaaggcgcgggatatgctgatcggaaatcccgcttccgttgtcttctattaatatagcaagcacttcatcattttgctcgatactgatgtcaatatgtttgtcctccgtgtccgctgtttcgaatgcgccgaacgcattttcaattaaattgccgagcaggacgacgatgtcatgctggtcgacatgctccggaaatgccgagaaactgctgttttcatcaattttcacagaaatgccaagctcttttcctcttttgattttgcttaacagcagccccgccgcggcgtcattctgaatggcctgatgaagaaaatcagtgacgctttcttgttctgatgattccttaaaagcaagccggagcgctttttctgattttccgagctgaatcagccccgcgatggtgtgaagcttgttcatatgttcatgattttggactctgagcgcatcgacaaaatttttcacacctgtcagttcttccgccattttcgccgcttccgtcctgtcctgaaaaatggcgacggctccgatgaccttctttttcatgacaatcggaattctgctgctcatgatcacctttccgctgacttggatttcttcattatatacggctcggttccgctcgacgatttcagggagccgcgaatcttttaacacgtcccagatcagcctgccgtcggtctcttgtctgacattgaatatctgcttcgctttttcattaaaaatggtgatgtgatgctgattatcgatcgcaatgacgccctcattcatcgagtgaaacgtagcggtccgttcctcatacattctcacgatctcatggggctcgagccaaaacatttgttttttgatgtggcgggccagcaaaaaggagccggccagtccgaacccgagcgccagcagaacgataaacagtatttcatgtttcagctgaagaagaatttcaccgaatccgggcagcgttttaccggcaaggacgacgccgatctgattcaaatcccggtctttgatgggataaaaagcgcggacggcggtgccgatctctccctttgcttcggaaaaataaatgtgctcggcgaacgccgcggcttcgtcctcaccccttgaacgctttccgatcattgtgctgacgggatgtgaatagcggatatgatccatatccatgacgacgatgtagtccgcttcattgatgatccttatttcttcgaccgcatggcgcacgtcttccctttgttttttctgctccagggcgcgtttgacatcggtcatctcagataccgtccgcgcggtattcatcagccgttttttcagctcgcgctcctctgtatgctggatattgccgaccagcacgatgccgacgatcaaaaaggtaaaaagcacgacgatataagaaagtatggtgattttccagcggatggtaagcttttttttcgtcattggcctcttcctttccgtctctttacgaaaacggcccgcccgattatgcttgttatagaaaatggcggagggggttttcgatgaaaagcttgctgacttgtctcagcctgatggtactcggtatcggaaccgctttattcatcggctttcatgatcgtttctcaacagaagaaccgtattatgatgacgaacaggaaggcctgaaagatcaaatggttttcaaattcagtcatgtcgtggctgaaaacacacctaaagggcgggcggcgaataaatttgccgacctggtctatcaaaagtccggcggtaccattaaagtagaggtatttccaaacgggagcctctattcagataatgaagaaataaacgccctccaaaacggggacgtgcaattcatcgctccctccacctcaaagctcggatcactgtctcccgaatggggtgttttggatctgccgtacgcgtttacaaactataaagccgtgcaagaaggcctcaacggcaaaatcggcacgcgcctgttcgcttctttagaaaagcatcatttgaaaggactggcgtactggacgaacgggtttaagcagctcacgtcaaataaagggccgatcttctctccggacgatttgaaaggacaggcgctcaggatcatgccgagcagcgtgatcgaagaccagtaccgcctgctcagcgcgcacccgcggcaggattcctttaattccacgtttcagctcttggaaagcaatctcgtagacggagaggaaaatacgatttcaaatatctattctaaaaaattttataatgttcaagattatttgacaatcagcaatcacgggtacctcggttatgccgtgatgaccgacgagcatttctggaattcacagacagaaaaaacgagaaccatcttaacggaggcgatgagagaaacgacggaatggaacgaagcctccgctgagaaaatgaataaagaccagcttgaagagataaagaagaattcatccattcatattcatgtgctgagcaaagcggaaaagaacacatggatgaaacgcctcgacccgatttacggacaatatgaacaggtgatcggccgcgggcttgtgcaggatttgttatccttgcgccgcgagccttagcaggaccaatacgcccatctccgtttcatcccttttcccgccggggaagtaaatagggacagagcaaaaaaggagatggagacatgtttacacatacgaaaaaactgcagcatccggctaaaccggatcgtcctgacccgctgttcgcaaaaaagatgcaggaaattttagggggacaatacggggaaatatccgtcgccatgcaatatttgttccaaggatggaatacacgaggcaatgaaaaatataaggatcttctgatggataccgcgacggaagaaatcggccatgtcgaaatgatcgcgacgatgattgcgagactgttagaagacgccccgctggcagagcaggaaaaagcggctgatgatccggtcatcgggtccattttaggcgggatgaacccgcatcatgccattgtctcaggactcggcgcaatgccggagagcagcacgggcgttccgtggagcgcaggctatatcgtcgcaagcggaaaccttctggcagacttccgcgccaatctgaacgccgaatcacaaggaaggcttcaagtcgcacgcctgtatgaaatgaccgatgataaaggcgtgaaagatatgctcagctttttattggcccgcgataccatgcatcaaaaccaatggcttgcggccattaaagaattagaagaacaggaaggtccgatcgttccttccacattcccgaaggcgctggaaaaacagtcattctcccataagcttattcatttctcagatggagcagaaagcgctgaacaaaattggctgaaggaaacagcgccggacggagaaccatttgaatacgaaaaggaaccgaaagcgcacggcgaaatagctaagctggaccccgtcccgccgtatgtccacaacacgcttcccggacgaaaataaaaaagcctctaaaggggctttttttatgtgcgcacaactgtccagtccggttcgtaccggatgtcggggtgatgtaacagctcgtgaatgacaggttcatccccctcgtacagcatcacttctattgaaagaatcgcagccttctgctcgttttcttcgtatatgcggtcatgttcgttctccataaaatcatcataggcctgtctgtcctcccaaacgctgatgatctctgcgatgaacaggccgtctgcgtttttccgccagccgcctgcctgtctgacgaagccatttacacatgataatgctccccaccttgactgtgcttgcgcaaatgcttcagcgtttgcagcgtctgtttcacatacaatctttttgatcagcatgaccgttcctctgtgatgactgttttcgcatgcgtatgctcgacacagagattcacggttctgacgtaagagcgggtgcggtgaatcgtgcctttcgggatgagcaggctgtcatttgctttgagcactgcggtttctttgtccttaaaatcgatcagcagctcaccttccagaacgatgaaccattcatctgagtcagggtgatggtgccagtcatattctcccgtaaacactgcgaggcgcacacagtggtcattgatctccgcgattgaaaaattgtcgtgtttttctttgactttatggcgatagcgagcaaattcagcatgtcagacacgagtgaaaaacccctttttcattttattgtatcggttttgcggctcagatcaagattttcccaaaatcaaaagcgatccggctgatgtgccggatcgcttttgatctgcaggttgtctgccttttatgcttttattagctgcttcgtctgtttccgcctttttggccgatttctttataaaactctttgtcatgatttttacttgtagcttctccgcctttttggccgatttcctgatagaattccttgtcatggttattgcttgtggcttctccgcctttttcaccgatttcctgatagaattctttgtcgtgatttttgcttgtggcttctccgcctttttcaccgatttcctgatagaattctttgtcgtgatttttgcttgtggcttctccgcctttttgaccaatttcctgatagaattctttgtcatggttattgcttgtagcttctccgccttttttacctgcttcttctctgctcattttgttattatcttgtgccatttttgaattcctcctttaattggtgttggttgttggtttcccgatttcagaactgataaacaaagaaaacacattgaatgtgttttcgggtggttttttatcattctgtatcgttcatgcgttttagaatccggcgttttttataaagcatgatgcctgtttccgcgatgctttctaaagctgaacggttggcggacgcgccgaagatgatgcctgcggccggaaccatttgcagcagttttttcgcggcgaacgtatcgcggtagctgtaaacgacttcccgccagccttggatttgcgaggcgacgcgctgataggtttggtcgttttgatcatattgccgtaaatcttgcaggatcgctttttttccgatgacgtcactggatgcaagctgaagcaatttgacgataaacacgcgttcttttttgtctttcggatcaaagccgtaagcaaccgcgatatcttgcagcgtctttaaggacaggccgagcatcgccggaatgtctgccgcaagcgtaaacacgccgccgactcccgttgcggctccctgcaccgtcgcggcctttacgcttgtacgcgctatggcttctgcgatttcgtccatgacggcaagcggcgcattgcggatgtcgtgaagcgtttgacatgtaccgtgcggcagccgtttttgaaactttttcatgatgcgcttttctgatgtaaggtactgtccgcctgactgaataaacgttcccgtttcatcgagaatgagtccgattttcctctgaataaattgcggtgtcagcttgtccaaaagctgaaacggcaagcgggtgaatgtttgccagaacatcgccctctgctgcgccttttcccatttttgaatgtctctcagttgtctttccaggtctgtccgctcttctgtcacccgtcctgcacgtcctttctgatttctttctacatagtatacctttatggcgttttctttttacacccggccggactttttatccggaaaacattccattgattaattttcttcaaattctatatattttataattttgaataatacgattgaaggagaatgctgtatgcaatggatttatttaagtttagcgatcatttttgaagtattgggtacgatcagcatgaaattatcaaatggatttacaaaacttgttccaagtattttattgttattgttttatatcggcagcctttgttttcttactttgactttgaaatatataagtgtctccatcgcgtatgcggtctggtcgggaatggggatcgtactgatttccgcgatcggaatttttttctttcatgaacagttctctgttataaaagctgtctctgttcttctgatcatcatcggtgtcgtttccttaaactttatttccgaaagtgaaacgtcatcaaacggcatcagcgttcatacggacagaaacaggtgatgaaagggttaaaggttctcttcctcattacagatattggatttatcatttattggattgttactttttttgagtagattccaaaaaacatggcgtttaaagattatgataacgccatgataatggcctggaactggtcattctttcccctagatattttcatttcattgaccgggctgtacagcttgtttctttataaacggaaacattcgttatggcgccatttcgcattaatatcacttgtgctgaccttttgttcaggcctgcaagcgattgccttttgggtatttatcggtgattttgatctcatgtggtgggcattcaatctgtacttgcttctttatcctttatattttattcggaaattgctggtctctcgtaaaaatagctgtcattctttttgatgaggcggttttctttttcttcaggcgggaaacacttttcataaaggagtgatagacatgccttggtctatgaaggattatccgcaatcattgaagaatctcgaggaacctgtgaagaaaaaagcgatcgaaatcgcgaatgcgatggtagatgagggttatgaagaaggacgggctattcccattgcgacaagtcaggcgaaagagtggaaaaaaaacgcttctaaagaagaaatcgatcagctgatgaaacacgatgatgaaacgaaacgcggaaattgaatcggaatatagaaaaaccccgctctcaagagaacgaggtttttctgcttataaaccgtaataataagatagtgtggtgactgaaacgtagcctgtcgctcctgcatacgtgactttcagccatttattggaattggtgtagtggccttgaacatattctccggtgacccaagaacctgtaatttttttaccgcttgagaatgttgtgatcgttgaacagctgaccttagagcatgagcgcatattagcaccgtaaataccgactgtgcccccgctggctaaaatggaaacgtccggttcagctttaggtttgaaagctgctgctgatgcagagccgccaaaagcgaataaagaaacagcaaaaatcatggctaaagaaatgatcgacaaacgacgtaccaagaaaattccccctcttttatcatatggccggaaagctttcctgacgttattatacttttttgcccggaagactgaaataagtctaatgctccaacttcttttcttcgcaagtgaccatgccgattctttttttgatagataacagccgtttattggactggaatcactgatatatcgttgattcaaacgtttattcagagcggccggagtttttccggaggtcatttgaatggtacagaaaggttttatcttccaatggaaagaaacattattattctatttacccgggaaacggaggaaatactgcgtctttttctcaggatcagttgcaccggacagaaagttgtgaagtgatatgagcaagtgttctcttttcacctttttaaaagaacgctcaacgcatccgcgcatgatcggacgcggaaacatgctttgcgaacggcatcgcttctttcccggaacgatgccgttttcattttcggacctttcttcggcgggatacatatcatagataaaacagggcatcaatgtaccggtttattgaacataaagaacttgacatctcataaaagcggatttatgatgtagataaaataatttgcatctaggaaactttttgttatttagctaaaaatctatcggaatttaggtgagacataatgagcaaagacatctcagcacaatcactgcaagcaaaagccgtgcaggatgcacttgacggcaaaagcaagggattcaagcggcttctgcctttcttaggcccagcctttatcgcggcgattgcctacattgatccgggaaacttcgctacgaatatctcagctggttcgaaatttgggtatatgctgctgtgggtcatcctcttttcaaacttgatggcttttttaatccaagttctttccgcgaagctcggcattgccacgggtaaaaaccttccggaaatcgccagagaccggtatccgaaatgggtatccgccgggctgtggatacagggtgaactggtgattatggcaactgacctggcagaatttatcggggcggcgctcgggctcaacctgctgttcggcataccgatggttgaagcggccattatcgcggcgatcggatcattcgcgattttagagctgcagcgccggggttaccgggcgctggaagcgggcatcgccggacttctgtttgtcgtggtgatcgccttcgctctgcagaccttctttgccaaacctgacgccggctctgttctcgaagggctgtttatcccgaaaattgacggaatggacagtgtgctcttggcaaccgggatactcggcgcaaccgtgatgccgcatgccatttacttacattccgcactgacacagcgccgtgtcgtcggaaaaacggataatgagcggaaaaagatttttagattcgagacgattgacattctcatcgcgatggtgatcgccggggcgattaacgcaagcatgctcatcgtcgccgccgcgcttttcttcaagaacgggctgtatgtagaagatttagacgtggcttatcagcaattcggccactatatcggaccggcttcagccattctcttcgggatcgggctgctggccgcagggctttcaagctcttctgtcggcacattgtcaggcgatattatcatgcagggcttcatccgttaccgtatcccgctttatttgcggcgtttcattaccatcattccgccgatgatcatcattatctcgggggtcaacgccacagaagcgctcgtatggagccaggtcgttctttcattcggcatctcctttgcgctcgtgccgctgattatgtttacaagcaacaaacgcctgatgggcgccctgacgaaccgaaaatgggtgacggctctcgcctggctgattgcggttttggtgatcgcgcttaatctgtttgtgatctacgattcattccgttagaaaaaaaccggccgtagcggccggtttttcttttgacgccggatgccgttcgtatctttttccgggcgtttttggtatgatagaagaaaaatcggagttttgcttatgtcagtatttatccttttttatctgtggattgtgccgattgtcatcggtatcttctgttctctttttgcttatcggacaacgggtaagaaacgtctgattcccggctttgtgatgatcgcattaagtatcgtttccttaatcacggggctttggatcggcggggtgaactatcatgtgttcatcggaggcatgtttttattcggtacgtttttggccggttccgccttcccgtttttcttcgctctctcacgcaaacgaaaataaacaggcatgccgcctgtttattttttttacctaagcctgcattataaaaaccgctccgataatgtgattccgcctcaatcagcctatacatgcaggctccagcccatgttcatttcacgaaactgcagctaaaataaatcctgccaaaaaaaaattttgaattgcgagaaaaatatcgtattaaaatcctatttacccaaaaaatacctattgatagaatggtatctgagagggaaaaatgttcaaagcggatcatacaggtcccgcctaaatacatagtctttcatttctctctacactacatttctaaaggaggatttcccattagacacgcagctaaaggcattctgtttgccgcatctttagcccttgtaactactgcttttgtccccgcatccttagctaaagaaaatcatcataatactgccaatgccactggaacgacaaaatcatttttttatcagactgatacgcaattttcctacggacttaaagcacaaagcgatgcatctgtgtcaaaaccagtcaaagatgtaatcagagaagtgctgaaaaataaaacaaaattattcaatcttgttgaaaaattagcaggaaagaaaataagaaatgaactcgaatccgttttcaatgaacacatcgaaccggttttaaagaaaatgctgaacgagtatgtcgccttaagctggactgacgtggaaaagaatctttatctttcacttaaaaagtccggactttctgacagccaggctaaaaacctcgctcatttgacaactttagcaatgaaagcattttaaaatcattcataaatgatcgtcaggaaaatacgtataaagtaatgcaaagtgctgttagattcactctaatagcactttttcattggagatgtcacatgactgtcttttttactgttttgctcactttcttatgctgccttgtgatttcatctcttatttttatgattctattaaaaaaagagatcgtggatacaccgccaaaccgcttagctcatgcagcattcatcatacttattggattctccctgttcttcgctgtgactgtccccagcctgattatttgttttgcagctgtaacaatacatcattttttcggagagtatatcatctatggttcactttcagacttatacatattttctgtcgtcgtcagtatcttagctttagtttatatgctaatccttacggcaattgtaaaaggaatgactcatgtttttacattacctgcttggtcagcctatatccttgaattcatttttgcatgggctgctgtttacttctcaatccaatacgtttccaatcatatcattgagaacatatctatatttcaaggtggagaaattcttctttcattgttcatcactttcttattttcgggattggatatcctttttactaatttggataagatcacaaaagagaaattaggctaagggggtaacaaatatgaggatcatgacatatatatcttatttttctatttctttagttttgcaggtggtatggctgctattaataaaagatactcctaatatatttctgatagatatgattacggtgtccttcttattcactctctttatgttcatcttggatcaaatgttcaaaaaaaagcggacaaattagggtctgtttttaataatcctcgggcttctctttcgttttgaaattgttccggatctggggatgttgcggcgaaccgttcattaatgtttaacaccagcctcggtaaaatacttctccttttatataacatcctgacttttccgtcatatattcaaacgaaaaaacggcaaaaaggagtaatgaaacatgatattgtttattggcaagttcatgttgctctttttattctgttcgctggcatattatttgtttaaagttgtttattacaatatagggaagaacattgcgcttaaaactccgaaagggacaaagacgaaccggacggcacatgtgtttgtcaaaaatggaactaaactgaatgatggagattactttatgatcgctgttgtgaccgctctctggctgttcttcagatgaaaccgcgctgatccatcacgagttttttgatcagccatcgctcgccagctgccgattttcacaatcatcgttttcgtttaggacgactatatgcaagcaagccgctcaacaaacaaaggagctgtcgagatcttctcgatagctcttttgtttgtccttgaatgattgaagataggcttaaaaatggacggcgtctttctcatgcatgcatcgttcaagaaaacacttcacagcaaaacggaaaggtgaacgcaatacaagtaacggttaagaaccttatgaggcagcgtatgttgattactggataagaaaaagaaatcccccagtcttaaaaggtggaggtcaaaaattggagaacacttaaatatttatagctttttcagcgatataaaaagttccagagtcactcatttcagcagtataaacatttgtcacacttaataatccagtaaaaagaataccgattaaagcggagctgattataagtttcttcattatatagcctccgtaaccttaagtatttgtgtttgggcatgtatggttttctttaaaaagtttcttccctctgcatagtttctcttctcaaaatgaaagtcacctaatttttcggttagctctgcgaaatcagaccaaaggcgtttctcttccaagtaacctaagctttgtttcacttctgtttcattatattcttcgtacaatgaattaatgatttttaatttagccaaatattcctcttcattagaagtccgagcacgatttaaagccgtttcataaaagaaacgtgcttccttggctttatcacattggtacaggacattcgccatcatatataatgatctcactccatacactgtatcaatatgttctttcacgtctattgcctttttgaaattctcttcagcagcaatcaaatttttccctcttaaataaactaagcctgagttatgaaagatcactccgataattcttttcactttttcctcatccaagccacgggcgttacttaatgcttcccgataatatgattctgcctccgtcagcctgtacatatcgtacatgttagcaccgaccatcatattacagccaatcactttcactttgtataattgatttttttcaaacaattgcttggctttttttaaatgattgagggaaacaaagtgctgatcaatttgataataggcatcagctattttgtaatgaaattcagcttgctccatttcatctgatacagcattcaactctctctctgctttgcgataatagcttatcgcatcaacatactctttatgatcaaattcatacattccacgaaaaaataatgagtaatacttcaagaggcctgtaagtcttttttgcggcttttctattttttcaagtagttcgtcgactgtggggcgatctcgatatctgtcttccggctccaaggaatctaacatcaattggtgacgaaagcacatcaatgaataaaaaacaagcaaatcctgatcctcttccatctcctctatttcctgttcgacctcagcctttaaaatctcagcatcaggcacactgaactggcgaatcattttgtaccattcattgatcttgacaccaacttgggacgacggtaaaacttgatccatatatacctctccctctaattgctatttttgtaatattataactatttgaacataaagtgaaaacgaaaaaaaaccgcaatttacttttgcgtcatactcacctgattaacttgttttaagacacagggaaattatacctcaacataaaaatactgtataaaaatactatttacccaaaaaatacctattgatagaatggtttctgaaggaggtggaaaaatattcaaagagaataatataggactatcctaaatacatagtctttcatttcgctggcagattacattcctaaaggaggatttttcattaaacacgtagctaacggtattctattcgccacatctttagcccttgtaactgcttcttttgtccccacatcctgagctgaagaaaaccgagataccactactaatgccactggaattaccaaaccaattttttataataattgataagccgttttccttttagcttaaactggttttaaagaagctattaaacgaatatgttgccttgagttgtattgacgtggagagaatctttatctttcacttaaaaagtctggactttctgacaaggctaaaagcctcgctcattggacaacgttagcgatgaaacattttattgttattcataaattattaggaggaaaatatatatgaagaagaaagtaatccctgtagttttaagcgcaactctacttacatcattcttgggtacttcaggtgctttagcagctgaaaacagaaccacaactcctgtaccggtaacgaaaactgcaccaggtactattccaactggaatgcctggcactattccaaccaaagcggctctcaatggtgactaccaaacccaaggtgtagtttcgtggtcctataaggctttcagagctgcctgccgttcaggtggatggcttttatcaaaagccttaaagccattctcccctaaagctgcggcatggattagaaaaaactctaagaaggttgccgacattatggataaaggtgaaaattggggtgtaaaacaatttacaaaagcttttaaagctatcggagctcctacagatgtagctaccactttagctaaattcattgttgctttgatttaacatatttaaaatttaaagtgctgttagattcactctaatagcactttttcattggaggttaacatggctatctttattaccgtattgctcaccatactatgctgtcttgttatttcatctcttatttttatgattctattaaaaaaggagattgtggatacaccacccaaccacttagctcatatagcattcatagggcttattggattctccctgttcttcgctataactgtacctagcctaggtatttattttgtagctataactgtaaatcattttttcggagagtatatcatctatggttcactttcagacttatacatattttctgttgtcgtaagtattttagctttaatttatatgctaatccttatggcaattgtaaaaggaattactcatatttttaaattacctgcttggttagcctatatacttgaattcatttttgcatgggctgctgtttacttctcaattaaatatgtttccagtaatttcattgaaaacatatctatatttcaaggtggagaaattcttctttcattcttcataactttcttattttcgggcctggatatactttttactaatttggataagatctcaaaagagaaattaggctaataaaaagaaaagcaggcaatttagagcctgcttttttattccctttttaacatttctccaagccttgctttcgttttcggcccgtaaatgccgtcagcaggcagtccatacatggactggaaccgtttgactgcatttgctgtcttcggtccgtaatagccatctattccgttgttctttgcccctttgtccggataataatagagagccgccaaagctgtctggatctgtttcacggccgttcccttagttaaggggcttgtcactttaaaaacgcccgatggcagcgtgtaagatgattttttgccttttgttggagagctggccgagtccgtcagctttaatacttggccgactttgataaaattcgggcccttgatactgttcaatctctggatggtggccatgtttacggcagttttctgtgcaattacagggaggacatctcccttcttgacggtgtacgtcgccacgccagtctttgttcctgtttttgctgataagggctgtgcgatgctaatgagcgaaccacgtttgttatgaactgtcctggccctccaaaagcttttttatcagccatcgcttgctagctgcagattttacgattttctttaccgtttccgcagattttaatacgatatactttcggttacggttcccgtcctctaagcttccaagcgggtcaaactgctgaccacttccttaccatggaagggggtcagtaaagaaataatcatcaataagaaagcctaaaaaaattaacaggcatgctgcctgttaatttttttataaccaccggcttcttaaaacagccgttttaagcttttcttgagtgacggcatttcgattttttggttttcaaagaagtttttcagcatgtatttgctgaagcccttcgcttggccgtaagtgatttttcccggaagcggcggctcgtcgccgatgacggcgtcgatgacgaccggctcatttgagttgagcgcttcatgaaaagcgggagccaattcctcgtgtttcgtcactttgatgccttttgccccgcagctttctgcaaaggcggcgtaatccatattttgcagctgggtgacgtagtcaatgttgcctttgacccgctgttcatattcaatcatgcctaaattttcgttgtttaatatgacaaccgtaatcggcagtttatatttaacagccgtcggcagatcctgcatcaccattgaaaatccgccgtctccgcaaatggcgatggactgccgatcaggttcggcaaggcttgcggcaatcgctcccggaagcccgcatcccattgtggcgagccagcttgagacgataaagtcctgcttcttcattttaaaatggcgggccatccacactgtaaccgttccgacatccactgacaggacggcgtcctctgcggccgcatcctgaagccgggcaatgacctgctgcggcttgagcggatgagtcgcttcggtttcatccttttcgatttccttccaccaatgcttcatgtgctcggtgcaggcgtccaaaaatcttctgtcttctttatattcaatgtattccgtcagctctttcagccccagagccgcatcactgacgattcccgcattgacgggatagcgcttgccgattttcgccggatccgaatcaagctgaatggcgggcgtatcatccgggagataatccctgtacgggaacgatgtgccgagcatgatcagcagatcgcattcctccatggcttcgtaggcgggctttgtgccgatttgcccgagattcccgagaaagtggggatggctgtcaggcacgacgccttttgccggaagagtaatcacaatcggagcggccgctttatcggcgaatgcgagcagctcctcttttgccgattttaacccttggccggcaagaatgaccggtttttttgcgttgttaatatattgcgcgcatgtgacgagatgttcttttttcggctctatatcggctttgaggtatatcggcgatgtgtaaaccggctcccgtttgattttttgcgcgaataaatcatcagaaacggttaaaacggcaacgccttttttgctgtaagccgtgcggatcgcctgattcagaagatcgggcagcgcttctgccgtatgtacctgctggttgaataccgccacgtcctcaaacatctgctctaatttgatttcctgaaagctgtcacggccgatttcatcggaagccacctgtcccgcaatcgccagcaccggaacgccgtccgctttggcgtcgtataaaccgttcagcagatgaacggcccccggtcctgcgattgaaaggcagacaccgatctgcccggtcagttttgcctcagccgcggcagccagggctgcgacttcttcgtgccgggtttggatgaatgtcaggttatttcgttcatgtctcagttcttcgataaattcattaatgctgtctccgggaatgccgtatatatgaccgactccccattgttcaagcagctccgtcattacgtgtcctgctgttttacttggcatactgcatcctccttttacctgtattcatcccctttttcatacgggttgaaacacgggctatactctcagcttttttctcagcagatcaaggatggataacagatttcggtctttaaggactgccttacgatttgccgccccattgagtccgtcttttatttgccgttttctgttcggcaccatgaacagcggcagccggttttgggaaaaccagcgtaaatcggcggtttccgatccgttcatcagcggtgttcctccggtaatggctccgatgaaaacgtgctgtgtatcttcaaatgccggcctttcatactcaccggatttttgcaggatggtcacgttataccctgtttcttcaaaggcctctctgacggctgcggcttcagatgtttcaccttcttcaatcccgcccccgggcaaatcccatagtggaacgtcttttcgttttacgagcaatatgtcccgcccatcattttgtatgatgacaaaagcgccttgtgccatgtcgtcctcctttacaaaaaagaccgcggcatttcagcctgcggtctttccgttactttttaaaatgatacggcagggtggcgacgatgatgtccttcttccaaaacagccggacgcggagcaagaaggctgattggttgtgaaggatggtctgccagcgttttttcgtaataaattgcggaaacagcaccatcacggagaactgttcttttttcgctttttgttcgaccgtttccaaaaacttatcaaacgggtgaaccagactgcggtatgaggaatgcagggtgacgaggcggacgccgttatgaagctcttcccagcgcttttccacctttttttcgtgttctctgtcaaaggaaacatgaaccgcaatgacctgatccgataatgatttcgcatactgaatcgatttttggacgacggtggtgacaccggcgacaggcacgatgacgacggttcccttgatttcctcaggctgctgatcaacgacccgcagctgttcgccgaccgcggtgtagtgatttttaatgacgaaaaacagcatgacgacagcaggcatgaataacagcaccggccagacaagattgaacttcgtcgcgaataaaatacacagcaccataaatgaaatggcggcgccgcatgagttgatcagcatttttaccgcccagcccttcggcttctgcctgatccacttgatgcacattcccgtctgcgacagcgtaaacggaatgaacacgccgacggcataaagcggaattaaatgttccgtgcggccgccgaataaaagaatgagcaggatggacgcgataccgagaaagatgattccgtttgaaaatcctaatcggtcgcctcgtaccgtaaacattctcggcatatactgatcgcgcgctaaattaaacgccagctgcggaaaagcggaaaagcccgtatttgccgcaagcacaagaatcagggatgtcacgccttgaatgaaatagtacaccgtatggcgtccgaaggtttccgcggcgatttgtgaaataacggtctcgttaggcttcggacccgtgccgtagccgtacgccagcaccgtaatccccgtaaataagatcgccagcagaatccccatcatggccaaagtgcgggccgcgtttttcgccggaggatttttaaaggccgggatcgcgtttgaaatggcttccacaccggtcagtgccgagcagccggatgaaaaggccttcagcagcaaaaacagcgtgatgcccgctacgggcgtgccgatcggtgtatgctcggccggatgaacctggcccgtcatgagcttaaacagaccgacgacgatcaaaaggacaagcgccgccacaaacagatagacgggatacgccaaaatggacgccgattctgacagccctctcaaatttaaaatcataatcagaatcacaagcaaaacagcaatgagcaaatgatacgggtgcagggccggaaatgccgatgtaatcgcgtcagttccggcagaaatgcttaccgccaccgtcagaatataatcaacaagcaatgagccgcccgcaatcaggccgggcttctcaccaagattttctttagaaaccatataagcgcctccgccttgcggataagcgtaaataatctgtctgtaggacagaatcaaagcaagcagcaaaatgagaacacccgctgcgatcggaatggaataccaaaacgcggccgcgcttaccgcagccaaaatgatcagaatctgttccgttccgtaagcaactgatgacagcgcgtctgaagaaagcatggcgagcgccttgagtttcgtgagtttctgctctccggccgcctgtgatttcagcggtttcccaatcaaaaatcttttgattgaatggtacattttttgtcttcccctttttttcattttccgtttgatttacaaacccttactgctatgatgtctctgaataacgattgcatgccatatttcggcacagcaaaaagacacagaggcaaacggatgcccctgcgccataatcgtgcacaggtttcattcatctcctctcatgaacgcttacgaggttagctgtcggattcgggctgatgagagttggccctacctgaaaaaggattcaccccaagcggcatgacgcgccgcaaattggttcccccgctctgattacagattaagcgatatagattataaaagagatcatactcccgtcccgttcagttgtaaaggggcttttatgctgtttcaaaaataaaaaaatcaccgccaaaaatggaaataaaaatacaaaaaaagaggcctgttaacggcctctttttccttcattactcttcacttttttcattatccgcttttcttttttccttcttgccgtcagccagatcagaccggccgcaataattataagcgccgcgaaaacagcgatatacgtgacgttcagtgctgcggaacggcttttcgtatcaggcgccggactgctgtcgtcggatttgatttgctgatggtttgaaaacagctgcttgccggccgtttcgttgacgacggttgcggcatcgcttgtgctgtctaaaaagctgatcagctcttttgtgacagacgcgccgctgcctgataacggagcaaaaacagcgatgcttcggccggagtcccaaggtgattcctgggtaaacgcgacttgtttcgttgtctcattcagcatctgaaacgaagaaacatcgtacgcgccgctgcggtctgacggcacgagaagcttagaggcgtttgatttcaaaagcggaatttgcggcaggcctccgataaacacaacattccggcctttggcatccgcttccttcatgtctgatgccgtctttacggtaaagccgtttccgaatgaatccgccaccagagaaagttctttcagtgtctgtatgtttacgtcatccgggatgacgatcactgttttctctttcacgccgcccgcaaacgggagcggccattgcccgaaatccgctttctgcgccgcatcacttaccggatacgtcagcatgctgcttttatcaatatagacccatttattttcgtcacggtcaatacacgggttgttatgtttcaaacctgatgtgacaaattgcagatcaatgtacctgctgcttcgcaaaagcttcggatcaatcgggattgagacgtggtaaaagccatctttatcttgattgccgagatcatcaaggcgcaccgcattcggctgtccgttgatcatgacgttcagctccgctctctcggcgtcattagctgaatccgccttcgtccggatcgattccgacgtctttaatgtaagtgaaagcttgaccttaccgtctttatcaacagcggccgccgcagggtaaaagaagtgctctgacgccgttttgtttgatccgaccgttacatttcccgcgccgaagtcctctaatgtcagtttattgcctgtcttttccgcagcgggctgaaggcggccgattgtcaaagtatctccgcccagctggcttgaataagcgctgtctgtgatgacgcggattttatccgccagcgttttgtctgagtgcgccgtgacaaacaggacgggctgccgtttgtcccctgatgtcagaacccgttcggcgagaaggagtttgttgtcttccgctttgaagttcccccgttcgaaaagctcttttattttcccgttccaatgctgatcagcgccgatgacaattgacggattgctgattttgccggcatcggattcttttacataggataccttcagcctgctgtctgccgttttcagaaatccttctgttttgactgcggcttcagcttccgccgaggtcggtttgtcaggaaggataatatcggtttcttcacccgtattgcctgattgggcaaacggatacgggaaatggccgagatccgctccctttgacttgcttgcttctgaaagcacaaggcggctgtccggataaatttttatccagttgcctgacgtatcctgcctgacgcagacgccctcttttaatacgccgtaaaatcgtaatgatacattgtgatagccttgggcggattggcttttgctgagattgagcttcaccgttttccgcttggagctgccgtcaagctttatggatttgacgggttcatcatcaatggcgatggttaaagaagacggggcaattaataagtttgacgcctcgtaatcaatcagaagcgactgatcggcattcgaagctcccgcaggaatctgataggtcagctctgagctgtctttcgccccgtacagtgtcatcagatcgccagtcagcgcctgctgctcttttgcgccggcgcttgttccgagagcggaaccgtccgttttcagctcccgggccgcggccgcctgcccgttatacatcaatagcaaaaggccagttatcaatatcgcttttttcaaaaaggtcacccgcttttattttgattgtatcgctccgttttgtaccacttgacttcctgcttgaacaatcggtgcttgatctctgtgaataatgaccagatgacgagcacgatccaagcctgagagtatgtaaagtacatcagaaatacgataaagaagttttgtttgttcatttctgttttttcaatgcttaaagtaatcatgacctcagtcataaacaggaaaaaggccagtatccacaaaatcatcgccaaaaacccgactgtcagatgcaggtcgtaaaaaagattgatgataaaaatcgtgtttgacatgatcacaccgaagaaaaacaaaaaatacgtaaaaaagaaataaaacagatcgaagatgatccgcttgcgtttcagcttgaaaaattgggataaaaacttaagaacgacgtactggttgccgcgcgcccatcttgtccgctgacgccaccagaccttccatgtctcaggctcctgctcccatgtcacagccgccgggaaaaagcggatatgatagccgagattatacacgcggatggtcagctcggtatcctccgccagcgccttatcatcccagccgccgagctgttcgataatgctccgcctgatcgcgaagttcgttcccgggatggtggcgattttgaaccatttccatctgccgccctgcgccatccactgaaaacagatggtttcaatattgataaacttcgtcaggatcgttttcgccgcattgataacacggaatttcccgacaaccgctcccgctttctcatcattcatcagaccgagaaccaggtagtacaccgccattttttccggcgtattgtccgcatcatacacgcagatcacgtctccgttcgattccgcgaaccctgagttcagcgccgaagattttccttttccggcgttcgggggctttgtgatgaccattttaatgaagtcatactgacgggaaaattcattgacgatgtctcccgtccggtcggaggaattatcattaacgacaatgatctcaagcctgtctttcggataatacaggttcaccatcgccttcagcgtctgcctgatgacgacctcctcgttatgcgcggggatgagcacgctgaccttcgggagctcccccatctttgcgcgccatttcggaatgttccgttcgaaggtcatataatgcctgaatccgccctgcatcagaaacatgtgatagagaagcatcacccatattaaacttaatgagataaaaaacagaatgttactcaaggcttcttctctccttaaagattcgtttttttaatgtggcgcgcaaataaaggacgtagcaggcgaacatgatgataaacaataacaccacgccggagagaatccaaagcgctttttcaagaggcgtctgctggtgatgattgaaaaaggccgttaccggatgaatcttgttttccacatgaatggttccgtctccgtccgttttgatcctgacgctgtccgacgttaccgtttgcttcgttttcttcagatcgagccactcgccgccgggaatccgctccatctgattgacgagctcgggaaggtatttcatgccgagatacggatggtagaaaccgcccgccgttccgccgccgaaatcaatcatctgagaaatatgattctccatatctccgagcggattttcctttgagttatcggcataaccgattgtttcagggtacagcgtcatcccgtccagcatagccggctttgagacgaacggaggggcgcccgaggttttccacgtcgcgccgctgagctgcacttgtccgaaaatgctggagaaataagaagatgcgattttgtagccttcttcagacatcgtgtagtgcggcgcttcgaatgacagcgggtaaaggccgagctctgtcagatcgtcaatcgcctgctccagcttcgttctcgtgtagatgttttctttttcacggaaaggcttcacatacgcccggtacgctttttcattcggaaaatcctgttccttttcaagcttgaccggagtatcatccgcattttctgacgtaatcggctgatccgctttggcatcccaaaattcaaagccttctcccgtttcgctgtatcggtatgcgtgcgtgtagccgtgaataatgatgctaccgcccatttgctgaagttttttcaggacgctgaccatttttggcttgtccgccaggtatactttttctccgttttccggattgagatagaccggaatgaccgccagaataaacggaatgtgtcttttatgcaggtaagcgcccgcttcgtaaagcaatctttcatctgacatcggactgatgtcttcaagccgcaaataaaggagggtgccgccctctgattctccgaatgcgctgcgcatcgctttcgccgtcagaaacgaatcatttaacaggctcgtcacaccgaaataatagtcagagcgcgccgttttccacataaaagggcgggtgctgccgtcaccggaccggtatgtataaagggactttccttttactcccgatacgccgagcacggacacccccttttcaagcggcatgtctgttttttcttttttgccgtaaatgcggtataccgtttctttttctgtcagggacaaccccgcaaattggcggaactgtccggcgttatagccgatgctgataagctgctgcggcatgctgctgatcagtgacacaaatgatgtgctgagcttttttttcgtgacgccgtaatagatgacgcgccgattctttttgaagtccgcggctgtgatgtctccgtcgcttttcacggtgacggcggatgagaaatggcccgcggtcagatcaagcattttgacctcagcggtttctttgccgtccgtgcttgtataaataatgagaatgccgtcctttttgtcttttgcttccgccggacggggaacataaaccgccgaaatcatgaaaagcgccgagagtaagagacgtatccatttagagttcattcatcatcatctcgttttccagttcatttaaaaattgctcggccgtttgtaaatcctttcggtacgccaagtaacatacacggaaggtgatggagacgtatttaccgttttgcagccggtacgtatccaattcctttttcagcttcgccagaacggccggcatgttttcttcaggcgtatgggtcagcacgatgccgaaccgttcggcggacggcctgaattttttgtctgtttcccgaacgcttgaccggatttggcggctgataaacgccagcagccgatcggtctctttttctccgtatagggatttgaattccttgaaataatgcatgtgcagcagcaaaaagacgaaggaattgccgtagcgttccgcccgcttgatttcctcggaaagctccagcttcatccgcagatggttgtcaaagccggtcaccctgtcgacggcgacaaagctcgtaatctcttcacgcagctgtttcactgagcgttcaagccccttcgccaactcgtgaatccttcccgctatgtaagaaaagagcagcagcgcaatcccccaaatgaccagcacctgcagactttcggcatcggcagacgccataaagctcccggtctgaaaccacaggagcaggctgccgagaacaaataagacgagtaaggtcatgacgagcgcgtagattgccccgaaccatataccggctcccgcaacaagcaatgtgatgcaggttatcagaagccctgcggattgctgagacgcatagtaaataaaaaaagacagcagcaccagcataactgctgtgtagctgcacagtttttgtgattcattgaatgatattttcattaaacaatttcctttcagccagaagcggcagcaggttatcgaaagaatgtgtatcgctcccgctcatatagccgccgtaatcgggtttcagcgtgtccagtgtttcaaatgaagtcattctttcataaagcggcttgatgacagccggatcagctttttgttctgctaaaaaaagaacggccagggcgtaaacggacggtgattcgtactgaaccgccggctccttcgtgtctgcgctgtatcgtccgtacagctgtccgcgcgacttaaattcctctatcatccattttgacagcgcggcagccttgccatcgccccgcttcagattcacggcggcgtacagctggtcgatgacattcacttcgctgtcatatttgtattcctttgtttcggtattgaatgatttcggcagaaaaccatttttcaggggagctcgattgagaacatcaaggttccggttttccgttttctcatcgataatccctttttctctgagcatctgtaaggcgccggggtcaacataggacaaggtcacggtctttgatgcggcatttgaagcggcatcataataatccgtaaaatacccgtcatttgtattgtatttttccagcgccttcccgatctgcaccgctgttttcccgtattcactgtttccccacagggttccggcctcattcagacagttcatgattctgaaatcgtcaattaaggcattggtgccgctcgctttattcccgtcaatcttccacgacacgagcccgtttttcgtcagaaacgaatcggtgagaagctgatattgcgcttgaaactgccgttcatctttcctgttcagcaaaaatgccatccatagtccgagagactcagataaatattccggctcaccggatatgttcgtccggatcatcccccgcccgttcatcaatttatgataaataaaatgctctgcgggctgaagcggtccggacggttcggccgccgtctgtttttcaggtccggcctccgcgcaccccgccgtcagaacgattgaaatcaaaaggatcatcagacgaaaaacgaattgcttcacagtccatcctcctattttacaaatccttttttagacccatatcttattttttcacaaagtatttttactataaaggaaacgataaaagaatactagcattttttcacattggaaaattttaaatggaagcgccgcctctcaccttttccctcttcacatggatcgtattcccattacagtaaaaaacacaacaaaaggcagcatttctttacaaatgctgcctttctctgatctatttatccaggccgagttttttcagctgttctgccagcgcgttgttcatcggctcctctttgttttggcttttcatataagagttaatgtcccgcttggatgcgcgtccggatttatctttcgccttccgcttttcaaagacggacagtttctcccggtggccgcatacacatgcgaaggtttggccttcgccctggccgcgaagctccattttcttatgacagttcggacagcgggcgtttgtttttcttgccagcgttttccggctgccgcactcacgatcctgacatacgagcatcgtgccgcgtttgccgttgactttaagcatcattttgccgcaatcagggcaggcggtgcctgaaatgttgtcatgtctgaaagtctggctgctgtttttgatctccttcaccgttttgcccgcatatgttttcatgtctttaatgaacacggcggatttcagtttgcccgctgcgatggcggagagcttttgctcccattcagcggttaaggccggcgatttcaaatcttccgggacgagctgtaagagctgcttcccttttgacgtaatgaaaatatctttttcttttttctcgatcaagaaactgttgaacagtttttcaatgatatcagcgcgggtggcgactgttccgagtccgccggtttcacccaatgttttcacaaggttcttctcttctccctgcataaaggcgcttgggttctccatcgcggataacagcgtgccttcattaaagcgcgccggcggtttcgtctgaccgctcgtttctttcaatgatgagacagtgaggcgctgcccctgctgaagatccgggagcgtctggtctttgtcttcctcatgatcgtcgtcatcctcgtacatatcatacacggctttccagccaggcgattgaaccgttttcccttttgcggtaaatgtttcgccgccgatatcggctgtgacctttgtttcttcgtattcgaacgccggcattaacacggcgagaaaacgtttggcaatcagatcgtaaagctttcgttctttgtcgctgaggcttgaaaggatcagcggctcctctgtcggaatgatggcatggtgatccgatactttcgcatcattgacgaatcctttatgcgctttgacgccccgcttcagtatttgattgacgtactgggcgtacggcttaacttccatgccgtttaaacggtcttttaaagtcggcacgatgtctgcggaaaggaatctggaatccgtccgcgggtaagtgacaagcttatgctgttcatacagcttttgaagcacggacagcgtctcttttgcggagaaaccgaagcgcttatgagcgtcccgctgcaattccgtcaagtcgtaaagaccgggagcgaagctttttttcgccgtttttttcaattctgaaatgactgccggctttccttgcaggtcttttgccaaacggccggtcaccgtctgatcgaacgttcttgtctgttttgtttttttatcctgccatgtcagcgtcatctgatcagccgccgcgcggaggccgtaataaggaacgggtttgaacgcctgaatatccgcttcgcgtttggcgatcatcgccagtgtcggagtctggacgcgtccgcatgacagctgcgcgttaaatttcgtggtcagggcgcgggtcgcgttgatgccgacgatccaatccgcttccgctctggcaacagcggaatgatacaggttttcgtactctttgccgctgcggagcttttgaaatccttctttaatcgccttatccgtcacagaggaaatccacagccgcttaatcggtttgcggacgtttgccttttcgataatccagcgggccacaagttccccttcccgtcctgcgtctgtagcgattacgatctggctgacgtctttccggacaagctgagctttgaccgcattgaactgttttcctgtttttttaatgacgacgagctttaaaggctccggaataatcggaagatcctcaagccgccatgattgaaattctttgccgtatccttcggggtcagcgagcgttaccagatgcccgagcgcccatgtgacgatgtagcggtcgccttcaagatatccgtttccttttttatgacacttcagaacacgggccaagtcccggccgactgaaggtttttcagctaatacaactgtttttgacatgcttttcacttctctttctttcacactcatcctgttattataacagacttcctcacgctctctctaatcgaggacgttttttgtgtcaatttctgagaaaatgacgtgggtcacggtttgggcatacggagaggtgcggttgatgaagtgttcgatcgtttccagactgtccgcgttaatcttcagcatataacacgccgccccggcgacccgaaaacaaaattcaatgttgggaatggattgaatgtaggttttgaattgatcgtattttccgtttttcaccgtcgcttcgacaatgcaggagacggggagcccgatctttttttgatcaatgtccaatgtatagcgcttaataacgccgaaggattcaagctgtctgacacgctctgtgacggacggggctgacaatttgatttttctgcccagctcccgcatggacaggcggctgtcccgctgcagctctttaatgatgctcagatccacattatctagtttcatgactgtagtccttccttacccttttggctatattatcaagagaaatccgaaaaatgacaagaacaacaggctgaaatcatgaaggttttttcaggaactgacgcgaaatggtcatattaggactgccctttgcttatagtatagaggaaaaaagatgtccgacaggagggagctgtatgttacacacgccgatcggcagacttcgcacgatggggtttattgaaggaatgtcgcttttggtgctgctgtttatcgcgatgccgctgaagtattgggctcatcatccgctcgccgtcaccattgccggttccattcacggcggtttgtttatcatttatctggcggtgctggcgtatgcggcgtttactgtcaaatggcatgtgaaatggtcagccgccggttttatcgcggcctttattccgttcggtaattttatttatgatcgcggcctgagaaattatcaataaaaaagctcctcttctgcagaggagcttttttcatgcgttacatccatttcgtcacccaggcgatataataagcgccggggatgaatacgagctgggcgagaagcgtgcccgcgacccttgatgtgaccatcgtcaatgaggtccattttaaggagacgtagctgcgcttgcccttcgccacatcgtctgccagtacggagactttcgggtcaacaaacacggccagcagcatagtcgcaacgccgttgattaagcctgatgccataacggccgtcgtgctgtgctcaggcgccagaaggccggcgtacagagcggacagaacaccgatcgtgtaaatagacgtaatgaccatattaatgacaaacaagcgtttcggaatcattcggaattgaagcccctttaaataggagactgacggcagtctgatataagaacgcgcatgcttcagcccgttcagtgaaaatccttttttaaatacctgcatgacggagcctcctccgtccgccaagtgtataatcgccctggagaataacgcgacgaatgtcggcaaaagacagatgccgagcatcgttccgaccgtggagccgaatattaaaaatcgaaactgagcgcccacaacagacagagcgtttgatccggcggcatcaatcagatgtccggtaaacggctgctgaaccatgtttgacatgcgcgacacaataaccatgacattaaataatgacagcgcggacgcgataaatccgactctcgcgccggaaagccgtgttgcataggcaagcgtttcaatcgaatgtatcagcagcagaaaacagaagataaacagtacttgtgaagtaataacgtgcaatgtatgattcctccaaatcttttcatactgattagactctgcagactgcggcaaggtttcggccgtttacataaaaaaaccgcccggatgtccggcgcggttttgtcttattcttttcttacgcaaataaataatatatggttgcccgccttagcctgcgggtgattcgtattaacagttccgacagaatcattcttcgaaagtaaacaccatggaagttcttgaacacaagacaacgaaagccctacctctcaatcgtcactgcggctccgaagccgcgccggtgtgaattgtaaaacaaaaagtcttttttccatctcttcgttaggggcgaatatcagaaggaaaagaataagctcagctttttttcaagctgtccgttgaagcctgaagcttctatatcaaaacagaaaaaagaagtttactttcttttttatttgcatgttgtcacttagcagttaagtataacagattgcccctgaataatcaaatgatttattaaagttccagctcggccggcgttttttcacccgcattcatgagcttgatctgcttcggttcaatttcgagaatcaccaggttcggatcgtcttttccgtcaaaccagcgttccagtttcggatcccacagcttttcttttaaatctgctgagttgttcagtttggcggttccggccacttccacataagcgtcaccgaatccttcacagtcataccctaacagaatatgaacattcggattgttttcaatttcttccgctttatgagtgtctttgctcgtcggcgtgtaaatcgttaagccgtcatggaaaaatgtcatgtagcgtgaatgcggtttgccttgctctaccgtcgcaagcgaaccgactttatgatgatccagtacttcaagcactttttctttgatttcattttgattcatgaagaatcactcctttttaacgtctccgctgttacttttccacattggggagacatttaaaccaagaaatgtgctcttctgccgatcttcgctccattcccgcttcagcatgctgtagttcaccgtgtcatgataggcgccctgtacaaaaatgccttctctcgtcagtccttctttctgaaatccgagccgttccgccaccgccctgcttttcgtgtttttttcagccgcgctgatcatgatgcggttcagcccgaggtcctgaaatgcatgggtgatgaccgcccggcagcttgcggtgataatgccgaatccttcatgctctcgatccagccagtagccgatctctgctttttgattgactgtatcgacattatggatgctgatcatgccgcaaaaccggcccttcacaaaaattccggcgtcaaacccattctcttccgcatatttatagcgccattcggggatgatcacatcgcggtacgtatcgatgtcagccagttcttccgcccagctgagccattcgctgagatggttttgatttcgcttcataacagaatacaattcgtccgtatcttctttggcaagcaatctgatcgtcagatgttcccggatttgacaggaaaacacgaccgcaccttctttcctttattagccattatacaggtaaatttatttttttccatacaaaaaagatgaggcgtgcagcctcatccttaaatgcgcgggtcggtgaaaacatcgtgatcatccgtgcttgtcgatgacatttccgtaacgaccgccccttcttctcccgcttgaaaccaatgcttcgtatccggcggaatggtgtattgtccgcccggctcaagcacaatctcatgccagacggtgtagtattccttgtcttcttccggcgggaggacgcttgggttctctgtcttttcgccttccacgtagagatacaccttcccccagcggcatcggaatgtctcttgttttcccttctcgccgccgaccggcggatggcggtgttccggacacgtctggcgcgggaagagcaccaattctttcgaacagtagcggtcggtattcacgtaaataaacagctgaagcccggtttcctcaagcttgcctaagccgtaatccatgatttgaatgtcttcgacttcatcatcagtcagaacgattcccgctttttgatagtatgcattcacgtcatgtttcgatatcgtcatcggtcagcctccttatgtggtcacaaatctgccgccgttgacatgcagcgtctgtccggtcatataagaggattcgtctgaggccaagagcacatagcagccgacatgctcaacaggctggcctgcccggcccatcggcgtatcctgaccgaaggaagcgactgtttcttctgagaatgtcgccggaataagcggtgtccagatcggccccggcgccacggcgttgacacggataccatcgttgacgagcgcttgcgccatggatctcgtaaaaccgttaatcgcgcctttcgtagccgtgtagtcaatcagctgcgggttgcctgtgtaaggattaatggatgtcgtattgatgatcgcgctgcccggcttcatgtaatcaatcgcttttttagtcaaataaaattgtgagtaaaagtttgtcttaaaggttctgtgaagctgctcgcttgtgatgtctttaatgctttctttcggatgctgttccgcggcgttattcacgagaatatcaagacgcccgaattcttcaaccgttttttcaacggcttcattgcaaaagtcttcctcaccgacatcgccggggattaacagacattttacgccttcttcttccactcgtttttttgtatcttccgcatcatcgtgttcatcaaaatagacgatcgcgacatttgcgccttccttcgcgtaagcaaccgcaacggcgcgtccgataccgctgtcgccccctgtgatgagcgcggttttcccttttaatttgtcagcgcctttatattctttgtattcgtaaacaggcgccggattcatttcgctttcaatgcccggctggcggttttgtgattccgccgggaattccttcggatagttttccatgtcaagttcctccttctggttcgttgtcatatttcttgtctacctctgctgtcttccggataaacatgattgagacagttcaaaacgttttcggagaaaaatgtttcacatggaacgcaagaaaaaaacccggctggcagccgggtttttgttctctattatgaacgtaccgcttgtttgcggagcacgtcttttctcacttttccaaggttgtttttcggaagttcgctgacgaactcaatgtccggaattttaaaggcagcaagacgttcttgaaggaatcgggtcacttcttcttctgtcaggtcttctctgccgtttgtcacgatgaacgctttcggcttttcgccgtagagcggatcagggataccgacaaccgccgtttcgagaattcccggcacttgctgaatgacttcttcaatctggtcaggataaatattatcgccgccgtagatgatgacatctttataacgtccggtgataaagataaatccgtcttcatccacatagccggaatcgccggtatggaaccagccgtctttcagcacttttcgtgtcgcttcttcgttaccttcgtagcctttgaataaaaacggacttgtcacaacgacttctccaattgagccttgcggaaggacttcacctgtttccggatctacaacgcggacgtccacttcttccatcggtttacccgcggaagcggctttatccattcccatttgcggattccaagagctgatgccccacgcttccgtgcttccgtatccgtgcatgagcgggatgccgatgtcgagatactgctggatcaggctgcttggcacctttgtgcctcccgtcatcatataaacgatagaagacatgtcagtctggtgcgtttcccatgctttcagcaggtatgtgaaatagactggcagcgccatgatggtttgaattttttctttttcgatgagcttcaagttttccacagggtcctgattgtctgtcataatgaatgtcgttccgctcatcgtgccgaccatctggcagataatcgcgctcgtatggtaattcggatggcatgctaagaagcggacatgctgcattctccccgtgtaagccaatgtcgcgtttacgtagttgtatatgccgccgtgagtgatcatgcagcgtttcggattgccggttgtacctgaggtaaacatcagcaatgccgtatcgttttcagacaccgtttcgacatccggtgtatcaccggagcctgtcaataaagcgtcaaactcaggcgttgtctccgcagctgttcctgtctcgatcttcagtttaagagaagataccagcgcaggaagaacttcttccataatctctttaaattcagtgccgaaaaagacagctttcggttcacaggctgctaaaatgcctttcatttcgtaaggtgttaattgccagctgaccggcacaacaaccgcgccgatttcgagtgccgcaaacatgacaatggatgacgcgtggccgtttttgcaaagcatcgccactctgtcgcctttttttattcctttatcaagaagcgcttgtgcaagctggttgattcgttttcgatattccgcgtaggtcagggtatgcgcaccgctttttacagcttcgatctcttcgctatttgaaatgtcatgcagaatcatatgctgtaatgtctccatattttcatctcccataatcataaatcacaaaaaactctgtcagattttcttcctcacgcaacccattttaaaccaaaaaatataacttgtaaaacaattttgttttagaactattccattcgtgaatgatacaatagtcccatgtttttagtttcttcccttccccttaccctcatacatgcagaaaaaaacacaccccatatgaggtgtgcgctttctgtttaccgctgtcctttctcctgaatgaaatgataaaacagcttgtttaaacgtttgtataaatcggcttcatcctccgtctggaaggcttttatactgtcttcggactcgatgatggcggagctgaccgcacttagtatttccgacccttcagcgggcatatcagccggcgccatcatcaccaaagcgcggccgacggtcagggaatttccgtccatgcctttgacactgcatggagctgtcaaatcataaattttgaaaaaaggcgtgacaatttcttcatttttgagatggtacagcgccatcgccgttcccggaatgccgagtccgccctgtcgttcacgctctgcaaggcgctgtgcggtttgtttggcattacggacaaatccttcttgctcaagcatggcaaacaaacgattcaaaaacagttcgtacgccgtgtttgactcaatggatttgatcgaaaagttccgcagcacgctttggataaccgccgcataatgtgccatacggccggccgcttccagcatatcaggcgtctccggctgcttctcttctcttttaccgtttctttttttgtcaagaatcagcggaatttttcttttgatgtactgcttcacctgatcagcgtcttcttcgtttaaaagcggactgaccatgacgtaatcaatgtttccatacgggatcggaacggtggatacgatcatgtcatacgcggtgatgtctcggtccttcagttcgatgagggaagacatatcaaaggaacggatttccggaagctcctttttcagtctggatgcgagcattttggacgacccgatgccgctggaacagacgatcagcgctttgatcttcgcttcttcccgtttgatttccagagcggagccgaagtgaagaacgatgaaagcgatctcatcatcagagaaaagaagccccggaaagaatttttccattccttcttctacggccatgtacagcagaaagtagtcgcgtttaatttgctcggtcatcgggttgtacatgtcgatattttctttcacccggttgatcgcaggctccagatgggcgattaaaccgtcgtataaagaaccgttttccgtcagatcaattttgattttttcagaaatgaagccgatcagctgcttcgtttgcaaggccgtttcaacttcaatgttttccggtttgaattccgttttgtattggcggttggcgctccgcaaatgaatggtgatataaccgatctcagcttccggaattgaaacgccaaacgctttttcaagctcttttgccatttccatcgcagagccgtactccttcgtctgctgcagcgcttttagttccgaagcctccatcgtgatggtttctccgagtctgattcggtccatcgcaaaggttaaatgaaccgcaagcgccatgtatgagctgtcagataaggcgatcgcgattttttccttgagctgaatcaagagccggtccattttcaaaagttccgctttatttacgaccccgaacattttttcagcatcgtcaggttttcctttaatattgaattcaaccgcttccaaaaagctctgaatatcaagccggttgacgatgagattgccgacgattttccgtttcgcattttccggacccgtcagctgtatgccgaagcccctttttcggatcagcgtcaagccgaagggcgcgatccaggtctccagctcatccagatcataactgattgtcgcgtttgtcacttgcaattcgttcgccagactgtagagcttgatcggctcttgcgactctaatagtgaacatagaattaaaagtttccgctcctcagcgctgtattcatgctgttcataggacaggtctgacaggagtttttgtttgtcctccgggtttcctaccgctttcagtcctttgccgggctgtttatcaagtgccagaccgaatgattccatcatcggtttgattgtttttaactcgcggtgaacggttcttgtgctgacttgtaaagcttctgccagttcatgcactgtctcgtaacggttctgcagtaatagatgtttcattaatttttgttctctcgctgtcatatacatgaaacgcgcctccagattttctagttgtgagaagtatggcatatggggagtgctgccggggaaagtggtgtaaattataatataaaacgctttcaatgattattcaaccattttcaaatggcaatttggcactggaccgtgtgacagtattgaaaaagaaaaatgtgtcagataatatgccatgacgcttgttactcttgatccgcacggctatacttcaaagtgaccttacttgtttttagacattgcacaccacataaacaaacgcccggaagataccttccgggcgtttgttctgtttatggaatatcgcagccttggacaccggtataaatcctgaaccactgatcatggctgagtttgtacgcggatgcacgcaccgcggcggaaatgcggttctcttttccgctgccgacaatcggcatgatgtctgccgggtgggtgaacagccatgcgtacatgacttcgtcaatggaagcggcgccgatttcttcctgtacggaacgaagcgcggcacggattcggagggccttatctgattgtcctgtaaagacgctcccgcccgcaagcggtgaccacgccatcggcggaatgcgtttttccagacagaaatccagcgtgccgtcatgaatattttccagcttgtacgccgagatttcaatttggtttgtgacgagcggatcatccaaataggattcgagcattctgtactggtgcgctttaaagttcgataccccgaaatatctgaccttgcccgagcttttcagcgcgtgaaacgcttcagccacagcctccgggtccataagcgggtccggtctgtgaatgagcagcacatccagataatccgtattcagattcaaaagcgactgctccgccgacgctaagatgtgagacttcgacgtattataatgatgcgacttgtttcctggccgctccggtgattcaatgacaatcccgcattttgtgacgatttcgattcgctcccttattgaaggcgaaagggacaaagcgccgccgaacagcttttcacacgtataaccgccgtatatatcggcatgatcgaaggtggtgatgccttggctgatacaccattcaatcagattcagcagctctccgtctgaaacattccattcgttcagacgccaaagcccgtgtatcactcttgaaaattccaggtcttcagccaattgaatgcgctgcatgtgaaatccccctttttcttagagcctcttgtatctctgttttcaggaattgcccatgctgtttcattctgcttcggcggccgattttcctttcagcccgcaaaaatcgtcatttaatgattctgaaactgctttttcgctttttcaacgacgtaatggcttccgccgcgttttttgacgtcttgaatcatcatcgcgatcaagaggtctttctttttataatcgtaaccgacaaaccagccgttttctttgccgtctttatcttctttagacgttttcagctcggctgtaccggtttttccggctacggtaatgccgcttacggccggctgatatgcagagccgcgcggatcttcaacgacgcctctcagccctttcgtgatttcttcggcattggctttcgacaccacttgcttatgccagatttgcggtgttttttctccgtctttgatcaatgtcggtttgacgagatttccgtctgttacaaatgcggtatagtcagccgctaagtgcagcggagacatcagcatctgcccctggccgtagcccgtatctccgagaaggatctcggaatctagcttgccgttagcgattgaggacttttcaatcggaaattggtacggaatctcttcatcaaagccaaatgtttttaatccttttgtaaacgcgtccgctccggcatctatggcattttgcgcaaagtagatgttgtccgatgtgatcagcgcgttttcgagatccacttcattcaggcgctctgatacgcgtgtgacatggtaaccgccccagctcgaatctttctgccactcttttccggtgatttttttcttttccgatgctttcaatgtgccgtttgtcaggccgactgccgcggcaatcggtttaatcgttgatcccggcgcataaagtttgttgaatttcgctgaaaacggattgtttttatcttcattcagctttttccactcttttccgctccagccgaaaagaaagccgttcgggtcataagacggtgcgctgacgagcgcgagtgtctctcccgtttgcggttcgagggcgactgccgctccgctgtcatctttcatagaatcatacagcttcgtctgcgttttcatgtcaatcgttacatgaatatcctgcccgctttcggctttcttttcagcaatgacctcacctgtttgcgggacgtaaattttccagccggtcttgccgcgcagcttgtcttcatatacattctcaaggccggcgatgccgattttggaagtatcgctgtattggccgtctttcgcttttttcagctgctccgctgtgatggttttaatatagccggtcagatgggccgttttttcgccgtacggatagtagcgggagctgactttcgttttcgtcacgccgtctaatgcaagcaggcttttgaccttgctttcatcatccggtctgattttttgaatcgggacataggagtcgtcttttacccagccctggttcagtttgcttttgatatcgtcttcagaaaggtccagtttttcagacagtttttggatcacgctgtctttatccttgccgagttttccagggataatgccgatttccggcacctcggtattcacggcgagaccttttccgtctttgtcgtaaatttgtccgcgcttcggttcctcatttgcgatctgcacggttttgtcatcggaaagctgtttgaaaataaaagaaggattccagtcaatgttccatgattctccatcgtctgttttctcttttttcaggacggccgtgttttcaaaagcgaccttccctgcttttgtatccatgctgactttataatcgatgtgctggaggtcatcttttttcttatcgtcttcgtcctgtttttcggcagtgactttcagatttttgacccctgcttgttcataaatggtttcatatcgttttacaaaatcctttttggatcgttttttcttttcatcctgggtgaggctttggtacatcttatcgtaatgaccgccgttccagtcttttacgaaatctttcattctgtcttcggccgattccgttttcgagcagccgatcaaacctatgattcctgcgagtaaaagtaataggtataacccttttttcactgtcaattcccctgccttccaactgttattttctcctaaaccaaatcaggctggcaaggatttttttctcatagcgtttaaaatttttttgtttttccggccgtcacggcccatatttttatacaatgtatctattaaaaaaaggaggaatttcagatgatcagagaagcagccatgctgtatgtaaaagaaggtcttgagggggaattcgaagaggcattccgccgggcggagccgattatcgcgggcatgaaaggttatctgtcccattccttgtccaaatgtatggaaaagacgcataaatatttgctgcttgtggaatgggagacattagaagatcatacaaaaggctttcgcggatcgccggaatatcaggagtggaaagccttactgcaccgtttttattcaccatttcccgttgtggagcattttcaggatctatcagactcagatcgcgtgaagcgtaaaaccgattaaggagatcgaccatacaaaaacggcggtatagatattgaatttcccggagccgtcgttttctttccgtttttcctccagcccctgaatgaacatgaccgcaccgagaaacacgagcataaccggctgtatgacggaggtatgttccgcatacgtaaatgcggcggccgcaagtataataatcagcatcgcgagtgacagttttaaggcgcgcagcaaagcaatccatcctttctgttatcattttttgaacacaattctatttctgtctttatcccccattattctagcgtactttttgcgcggatagaacgaaagtcggacaattttaagtttgttttaaggagcacgaaaagcgcgctccccatgaaaaggagcgcgcggtttatgagcgggcgaggcttccgtatccgagcccccgcaggacgcatgccatgacttcataccccttgctgttggggtgtacgcggtcataagaaagatattcattcatttttcctttgaaagcgctgtggacgtcggcaattttgacgtgcggcgccgatgcgagtgtgctgaggtgcgcattataagaggatatccatttttctgcaatggagatgcccgggaaaggattgtataaattgaagacgcggatctcataaggagacgggtgcgacccttttaaggcagcaatcttggttatcatcttttcaaagttctcatggcagtgactggacacgctggtgaataccgaagcgtccgatgtttgctgatatgcctgaaccgaatcgatcaaatcgttgccgcagcctgtaatcgtaatcatatcagcagcctgaatccgcctctgaatgtacgggaaggacataagcccgagaatttctcccgtctcaaggcctgatttggcaaagatggatacgtcggttcttgtctgtaaatcttctgccatcatgcgcccgaaccgctggacaaaaccggcggaaaacggcccggatcccctccccgtcgtcaaagaatcccccagcgccgtataaacaagtcccatttactttcctccactcgttactatcgatattgtaatgtacgcgagtgaagaaaaattggctcggtcaataacctaatttctcagaaatatgctgtgcggcgtttttgaccttttcggttaaatacggcagcctgtcctctgaaaaccgggcttcgaagccggcgatgctgattccagcagccaccttaccttcgtgattgaaaatcggcgccccgatcgccgccgtataatcttctaattccgaatagctgatcgtataacctgattgcaaggatctttcaatggagtgaagcagttcagcccgatccgtcatcgtgcctgaggcgattgcggcaagctttgtcttctgaatgtatgtgtcaatctcctcttccggcagaaacgataaaatgcttctggcgcaagctcccgcgtacagcggcgaccggcggccgattgccgtatacaggcggacggtttgggtgccttcaattttttcgacgtaaatggcttcatccccgtccctcatgatcagctgaacggcctcatccacttcgctgcacagctcttccataatcggtttggctattttcctgatatccagacgttcagagacgagctggccgaattgtaaaaagatcagaccaagctgataacggccgtccgccgcccgggtgagaaaccctgtttcctccagtgagcttgccatccggtgaaccgaagtcttcggcatttccgatagagaaaccagctcatttaagctcaggctcggttcagtgagaaacaaatgaagcagttccattgatttgatgacggttttgtttttgttttccatggtctttagcccctttgtcagatcagccattccattttgagccttgctttcagctccttcagctgctgttccttctccaaaagcagcatttccgcttcctccagcgaaacggcccggaacgtaatatgttcccccggcatcgtttgggcgacgaggggaagatcggcggatatgatatgcgccattcgcggatagccccccgtcgtctgtctgtcagccagcagaataatcggattgccgtccggcggcacctgcaccgttccgaacgtcacagcctcagataccatttccagcggctcccgcaattcaagcggagcgcccttcagccggtagcccattcggtcggattgaggcgtgaccgtatatgactcttgataaaaacgtaattttgcttcttctgtaaaagcgtgaaattgagcgccttcaagcactcgtatgaccggattttttttcagcggcagaaaccctctgctgctgacagaccaatcaggcgctgagaaaccatactgtccgaaagaatcgctcagacggtacgcgattgattccgaacatggcgtcatacggccgagcggcagctcatcatctttttgcagcgctcttccgcaaaagccgccgatccccgctctgacatacgtgcttttgctttccatgacggcgggcacatcaaatccccccgcgacggcgagataagcgcggctccccatcttgcacggcccgaatgagacgacgctgttttcctttatcaaaaccggtttccacagaggggcgggctccccattaatatgaaaggcgaaatccgcccccgtaacggcaataaccgcgggttctgagaactcaaaggaaggccctggccccataagcgtaacttcaagccccgcctctttttcttgatttccggcaagaagattggcgatgcgcagagagatcgtatccattgcgccgcttcccagcacaccgtatttctgatatcccgtccgccccgtgtcctgaaccgtcgtcaagagaccgggttttaccactttcatactcattcggctccctccttgatgcggctgtactcctctgctgtgatccggacgaatttcaccgtatcacccgctctcaatagactcggcggatgttcttccggcctgaaaagccggagcggggtgctgccgatcagctgccagccgccgggagtggatatcggatacacaccggtctgcattcccgcgattcctactgaaccggccgggatggacggccttggcgacgcctttctcggcgctctgatccgctcagacattccacctaaaaacggaaatcccggcgcaaatccaagcatataaacgagatattcgccttcagtatgaatgcggatgacgtcttccggggtcagatcgttcatttcagcgacctcttctaaatcgggaccgaaatctccgccgtagcaaacggggatttccatcacccggcgctcttttttgcggccggtcattatatggctgagacgttctgtcacttctttcttgaccagggcaaaaggagagacgcctttttttatgtttgagacggcagacacgtcataaaagaccgttaagcttgtgaatgccggaatacattcaacgaagcccggaaacggccgttcttccatacaggctgccgccgcctgcacccggctgttgacctcttcgctgatgtgcccgccaaagcggatgataacggcggaatcaccgtacggctgtatatcaagcgctgtatttccgctatactgcatcattgtcatcacctcgttgtattctttctcacttacaggacagcaagcgattcattttgtatatcggtgatcagcatgtgccccggtgaatgtgttattacgatatcaggctttgcttccatgatcaccgcctggggtgtaacgccgcaagcccagaatacgggaacttcaccttcccgcaccgttacggcatctccgaaatccggctgatgcaaatcgctgatgccgatgctttgcggatttccgatgcggacgggggcgccgtgcacggcgggaaaacgtgacgtgacctgcgccgcgcggactgccagcctttccggaatcggtctcatgctgacgaccatttttcctgaaaacgggcccgccggaatacagtcaatatttgttttatacatgggaacgttcacgccttcatcgatgtgcctgatcgggatgtgctgattaataagggcctgctcgaatgaaaaactgcagccgatcaaaaacccgacataattatccttccaatacggcgtaatatccgttacctcttcagtaagcacgccatgccgataaatcctgtatttcggaaagtccgtccggatatcagctcccggcgccgctattgccggaacgggtgaacccgcatccgtcacatcaagcaccggacaaggcttttgattacgctggcagaataagagaaaatcaaaggcaagatccttttgcaaaacgacgagattggcttgtgcgtaagaagcggccaaccccgccgtcggcccggtcatctgccctttcctgataagctgtctgacttcttcgggactcatatcactcatatggtttttcatatcatcagctccatagctgcggcatttgcgagaataatgtatagatgcccataaccgccatgacaaccactacgatcgcccctgcaatcgtgagccagatcggatgcttgtaatcgccgacgatttttttcttataggcgcccaacagaatcatcgctaatgcaagcggcagaattaagccgttaagcgaaccgaccgcgaccagaattttggcaggctggccgatcgtgacaaaaataagagtggatacaataataaaaccgataattacgccatgtgagtgcttttcgatttttgccgaaaacgatttgaagaatgacaccgatgtataggcggcgccgatgacagacgtgatagcggcagaccacatgatgacgccgaaaattttatagccgacatttcccgccgcaagccggaatacagaagccgcgggattatcaggatcgatgcgcaggccctttgaaacgacgccgagcacggcgagaaacagggcaatccgcataacagatgtaatcaagacgcctgtgacggagcttttcgtcacctgaggaatgacttccttcccttggatgcctgaatcaagcaagcgatggcctccggcaaatgtaatgtatccgccgaccgtgccgccgacaagcgtcacgattgccagcacactgatatgatcaggcataaaagtttttacaaccgcgtgtccgaccggcggacccgtcgttacggcaacatacaccgtcaatacgatcatgacgattccggcgatctgcataaaacggtccatgacttttccggcttcctttatgacaaaaatcagcaccgcgaccgctgcgctgattaaagcgccgatctccggtttgattccgaataatacttgaagaccgagacccgcgccgccgatgtttccgatattaaacgcaagtccgccgagcacgaccagaaaagcaatggcataaccggcgcccggaagcaccatattggcaatctcttggccgcgctttccggaaaccgcgataatccgccatacattggtttgcgcgaaaatgtccaaaataatagaaattaaaatgataaagccgaagcttgccgccaatgtattggtaaacgtggccgtttgcgtcagaaagccgggcccgattgatgatgtcgccatcaaaaatgtcgcgcctaaaagaagcgaccatttgccggaagcctttccggctgtttttttcttttgctccatgctgtcttcctccctctgctgctcagtcttttgcaagcgcgctgatttgaatgtctgccgcttttaattcttttttgattgtttttgcgaatgtcagcgcgtgggcgccgtctccgtgaatgcagaccgtgtccgctttcaggtttacagcttgtcccttacgtgatgtcaccgtgctgtctttcaccatttgaatcacttgaccgaccgcttttttgtcatcctgaatcagcgcatccggctctgaacgcggcgtcagcgtgccgtcttcctgataggtgcggtccgcaaacacttcgcttgccgtcctcagtccgattcgatctcccgctttaatcagctcgcttccggaaagcccgaaaagaataagcccgggatcaaaatgacagaccgcctgagcgatggcttttgacaggccgggattgacggcggccatattatataaagcgccgtgcggcttcacatgctgcatctcgacaccttccgcttttaaaaaccctgacagcgcgccgatttgatacagcgtcagatcatacgcttcctcgggcgtaatcgcgatctgccgccgcccgaatccctgcagatcgaacagcccgggatgagcgccgattttcacgcctttttccgccgcaagcgcaaccgttttgcgcatcacgctgggatcacccgcatgaaagccgcaggcgatgtttgcagatgtcacataatccaaaatctcttcatccagtccgattttataagcaccgaaactctctcctaaatcacaattgatgtcaatctgaaacataagctccctcctgtattgtaaacgttttattttattatcattccgatatttggaacgactattccgaattgttggatttctcttcattatatttaattctgacaagtttgaacatccttttgtcagaaaacctaccatggacctagtcacaaatctgacaaaacaaaaaaagagagcctcatgctgagactctctcttttttctattataacacccagtggcggatcgctttggcgaccccgttttccgtgttgacatcagtcacccagtcagctgtttctttcacgatgtcctgcgcgttccccatggcgacgccgacacccgctttttcgatcatggcaatgtcattcagactgtcacccatggccatcacattttccatcgtgaagccgagtttttccgataccttcgccagcgcagccgctttgttgataccgagggcattgacttcgatgttgatcggacttgagtttgtgatttcgagctccttgtattccttgagctctttcagcacctcattccgcacttcatcatcctcgatttcgaacccgaacttgagccactgatgatccgtaatcgtttccgggaattcccctctccacactctatcgacggtagaggcccagaaattcgtgttgtgcttattcctcagatcccataatttttgaatatgatcggtatgaagaagcttgcgctcaaccagctcaaagttggaatcccagatttcgctgccgtttgccgtgattaaaaaggatgacagctcgagagactcagccagttcgcggcaggtcatcagcgtgcgtcctgtgctgatgacgacgtgaattcctttcgcctccgcttccttgatcgcccgccggttttcctccgggatgagctgctcgtcattgagcagggttccgtccatatcaatcgcgatcagtttaatatctgcgtcttctctttgtatcggcatatatgtacctcactttttatattgtagtcgtctctattttaatacatatgacccacaggaacaaaaaaccgcttcctgcgtttggcggggcgagcgttgaggaaaagaaatattgaggtgatggaggatgaaagaaagaaaacaaaagaacaaaccgaatgaaaatcctgaacatcatgatttaacggatccgattccgctggaagagctgaaggaaaacgccaatgacgaaaaacacaaacatgaccagagggacaattcacaaagtgagagagattatgatacaaaataacacgcttgtccgaaagccgccggtggaggcggctttttttacgatggctggataaatatgctgagctccgcttccgccacaggcttcccggcaacggacgctttcgcccggccgaacacaaaaccgcgtctgattcgcgtgacctcaaaaaaaagatccagacggtctcccggcaaagcggcacctaacctttccgctttcttcaccgcggataagagaccgagaccgtcaccgccggtaattcccgcgcaagccgccgtttgggccattgcttcaacgacgagcgaaaatggcatctctctttggtattcagttataaaccagtcattttcactgatgtttttgtaagcagccgcccattttccggcttcactgttcgtcgtgccgtcaatcaaaagaaacggaaaacgatggggcaatagcttctgattcatcacgcagcctcccttccctctcattataacgcaagaaaaaacccgcgtccccccgacgcgggttcatttttattgattgagctttttgagcacgatgccgtgcagcggttcatgcggctgaataccgcaaatgtcttgaagaacgccgctcgtgcctttttccgcgataagcttttgcagctcaaccgcttccggatcatcctgatagtcaaagcgcagggcggcggcgataccttccgccagcgcattcggttcttttatttttttggccggccctactaatctgtcattcgctccgagttttctgagcggtgatctggcgactcttgtcacatcatccgtgatgtattcattatcaaagcggctgatgatttttttcatgtactgctcgtgttcggcttgcttaaagccgtacgctttcaccaagtactcgcccgtttctgaaagtgcatcgtacacgacacgccggatttccggatggccgatggcctctttgacggtttttaatccgcgctgatagccgacatacgccgtgacggcatgcccggtattgacggtaaacagctttctctcaatgaaaggcgtaagatcatccgtaaacaacgcgcctttaagtaccggctgatcgccggcaaagccggttctgtctatgacccattcaaaaaacggttctacggatactttcagcggatcttcatggtgctgaatcggcacgatccgatctaccgcagaatccgggaagccgactgtccggttcacgagttcccgctccgcttccgtcaaatgtccgaaaacttcttttttcagaaaactgctgccgccgatcatattttcacaggcaatgatattgagaggctcagaggacgttctgcgcttcagaccttccgcgatggacggggcgatgagtctgagaacgttcgggcccaccgccgtcgtaatgatcgccgcttcattgatcagcccgtacagctcttgttcttgcaccgcgctgttgatggctgaaacggggccgatgatttctgtctgcctgccgccgtcggcaagctccacggtatattccttcttttcattgagaaggctgaccatcgtttcattcacatcagcgaaaactacgtcatagccggaatgatggagcagggcgccgataaagccccgcccgatgtttcccgctccgaaatgaagggcaatcatgtcagttcacctcgctgaaaatagcggccagttcttcttccgtctttgcattgatcagccgttcgatgttttcttcctctgagcagatgatggcgatgtttgacaggatgtctaagtgttcattgttttttccggcgataccgaaaacgacctttgccgtattgccttcaccgtattccacaccattcggaatctggatgacggaaatgcctgaatgaagcacctcatccttcgcatcttctgttccgtgcgggatcgcaatgaaatttcccataaacgtggatgatgtttcttcacgttcgaacattttttccacatagccgttcttcacgtaaccgttatcaatcaacgtctgtcccgccaggcggatggcatcctcttttgagttcactgtctggttcagtttgatgttcgctttagccaatacttccatgatgaagatccctctttctgtttgattagtttttaagcttttcaatcagttcatcgtatttcgggctgtttaagaaattatcaaccgaaatgtgcaccgcctgcggcagcttcgctttcgcgcggtcagtcaggtccttatgcgtaatgacgatatccgcgtcattcggaagattattgatcgacgtatttgtcacatcaatatccaggtctgcttttttcactttgtttcttaaaatggaggcgcccattgcgctcgatcccatacccgcgtcacatgcgaagataatgcggctgacttggtcagcggaaatatcagcggcgctgttttccggctcttcctctttgtctgccaatgcggccgccgcttcacttttcctgcctttcatttcctgcattttttccgccgcggctgtcaaatcttcttcgcccgctttagacgatttcagaataagcgccgagacgataaacgatacggccgcagccacgatgacgcccgccagcacgccgagatagcttcctttcggcgtcagcgccaaaatggcgatgatgcttcccggagatgatgcggcgacaagacccgcgttaaagatcgagaatgtgagcagtccgctcgctcccccggcgatcgccgcgaggatcagcatcggtttcattaaaatgtaagggaaatagatttcatgaatccccccgaagaaatgaatgatcgccgctcccggagctgtcgatcttgaagagcctttcccaaagaacatataggccagtaaaataccgagtcccggtccggggttcgcttccactaagaacagaatggattttcccgctttggcggcctgctcgattccgatcggacttaaaatgccgtggttgatcgcgttattcaggaacaggactttcgccggctctacgaaaacgcttgcaatcggcagcaaattcgcgtgaacaatgacttccacacccgccgccagcaatttgttaagagacaggacgaccgggccgatcgcataaaacgcgataatcgtcagcaccgcgccgataattcccgccgtgaagttgttgatcagcatttcaaaaccctgtctgactttatctttaaacagacggtctaattgtttaatgagataaccacccaaaggtcccataatcattgcccctaagaacatcggaatgtccgctccgacaatgactccgatggcggccgtcgctccgacgactcccccgcggtgatcatagatcatttttccgcccgtatatgcgattaaaagcggcagaagatacgtaatcatcgggcttaccaatgtattcagctgcggattcggaaaccaccccttaggtataaacagcgcggtgataattccccatgcgataaatgcgccgatattcggcatgatcataccgcttaaataactgccgaaccgctgtatcttcactttcatgccagcttgctgttcttgctgcatgttcattccctccctgtttgcctgccttcagatgaaaataaataagacacggggtttctctctcccctgtgtcttcatcataaaacgcttacaatccccattcaatgaaaagtaaagaggagtttggcacagagactgtgacaaatccttaacaaaaaaaagacacctcatcaaaggtgtcttaccgctttctgtatataatgtgtccttttgtgacgacgagcttggcaatgagccgctcactgacaataaacaccggatacgcacatacgagcgcgaaaatggcggccggcacataccgcgctgccggaaacatcggcatgacggcggttctggccatctgcacaagataaatcaaaagcaccgtgatcgcaatggccgcagccataatcggagctgatactttatattcacgcaatttcacatggcaatgcccgcactgaaactggcacgggatcatcgatgatctgaccatgtcgcctgtaatcggcttgccgcagttcgggcaggtcgtttctttcatgtttattcctccattcaactcttctattataacagagtctgactgcgtgttttacatttgtgattgttcaacattttttcacatattttatcatcaggctcttgtgtgcatttgtgaaaacatctactcttagagggaggttcatcactcattcgcataaaaaggaggatgcagaattgcttccgattcacagacagcaaaccttgcttgaatggctgaaagaagagggcgcgctgaaaatctctgacataagcgagagattcggcgtctccgagatgaccgtgtacagagacgtcaatcagctggcggatgcaaaccggattatccggacacccggcggcattacgctccctcccgcttcagaacgaagcgccaatcaatgcggctattgcctgcggccgattcagcattcgtattctgttcagcttattaccgtttcacaaaccgttgagcagatgtgctgcattcattgcgcgattttgcggtatgaggataaaaaggatgaagtgtcccacgtcatttgtaaggattttcttcttcagacgacgctaacggcagcttccgcatactttttagtccatgccgatattgaccttcactgctgccggcctcaggcgattcccttctcaacgcttgattacgcagaacggtttcaaaaaggattcggcggggtcatttgcacctttgacgaggcggcggacatcatcttacacgacaggcagaagggatgcacctgcagcaagacataacaacaaccaaccggaaggcggtgtcatcatccatgagacagaacaaacgctggctcgtctttttgctgttccttgttttgattccgaaaacaagcttcgcccacgcctacatcacaaactcaaatccgggtgagaacagcgaattaaaacaagcgccgaagcagattgaaattgagtttaatgaacagattgaagaaggcttccactccattaaggtctataattcatccggtgaacgggttgacgcgggcaaaacggtgattcaaaaaaataatgcccgcatcatgaccgcggcattgaaaaaaaatctgccgcatgatatttacagagcggaatggaacgcggtatcggccgacggacatccggtatccggcgtcatccctttcagcatcggaaaagccggcggagaacttcaggagcagacatcatcgcaagcggcgcttcatcccgaagcggccatcgaccgcggtattttgtacaccgctctctccctgtttatcggcacggcttttttccatctgttttggtacagaaataatgaagattcatcaaaagcaaaacgaactgtaaagctgctcgtgatttctttatgtttaacggggctcgcgctcgtgtgccagctcccgatccagacgaaagaaaacgcgggcggcgcttggagcgccgcgtttcagccggactatgtaaaagaaacgcttctgaaaacggcaggcgggtacgtctggatgatccagatcagcttatttatcctgctcgccctgtccatgatcccgctgctgaagaagaaagcattccggtcatttgcgtactggacggcgccgctgttattcttcttcgcttcgcttttggcaaaagcattcgccgggcatgcggccgttatcgacgaaaaagcggtcggcatcgcaatggactttctccatttatcggccgcgtctgtatggatgggcggtatcgccgcgcttgtgctgcttctttcatcagagtggagagaacccgataaaaccatcgcttgggaaacggtcagacggttttctccttgggcgttcgcctctgtcggcgtgctgttattttcaggagtgctgaatggatttttcattatccgctcgttcgattcactctttcacaccgcttacggcaagacgctccttttgaaaatcggactgtttgtcatcatgcttgcgctcggcgccgttcacgtatggatgacgaagttcagcagaaaaaggagcatcagcgcaacgataaaggccgaatgggcactaggcattgcggtgttattcacaaccgccgtcttcacaagcctgcccagtccgcctccgcccgcgccattgccttttaacggctcagaaacgatcggaaacggggaaaccctatccttgcacattacgccgaaccagccgggtaaaaatgaatttcaagtcattgtcaccgatcataacggcagcttagtaaaagacattcagcaatttacggtcactgtttaccagacgggcttcagcggcaaacagcatgaaagcacctttgatttgaagaagacgaaggaaggcacattcgaagccgccaacctgtccatcaccgaaaagggaaactggaagatcaaagtccacggactgacaaacgattttaatgaaatcaaccaaatattctcaacgacaaactaaggagtgtatctcatgttgaaaaaaaaagctttaatattcatatccgccgtgaccctgtcactcgtcggttttacggctgcagcaagcgcccacgtctcagtcaaacccgcggaatccgcggccggttcttgggaaacgtacacgatgaaagtgcctgtggaaaagaatgagccgacaacgaaagtcgtgctgaaaatgcccgccggcgttgaatttcagcagtatcagccgattccgggctggaaaacatccgtatccaaacatgatgacaaagcggtctccgtcacttgggaagcaaaggacggcggcattcagcccggccaattccagcagttcacgttcgttgcgaaaaatcctgaaaagagcggagatgccgcttgggacgcttaccaatattacaaagacggcagcattgtagaatggacgggtgatgagaaagccgacacgcctcactcgattacgaaaataacgaaatcggcgagcgtgacggatgcgcacggagctgaacagtcaaacgaagaaagcaaatccggcgtatcagcgcttgatattgcggccatcgttctgtcagctgcggcaattatcctttccatcgcggcgcttgtaaagaaaaaacgtgtgtaagcaaaaagcgatccggctctaaagagcctgcgatcgctttttttcttatccgcggcctgcctggaaagacggatatttggtcattcccccgtcagcaaacagcgtaatcccggtcacatagcttgattcctttgaagcaagccagacggcgacagccgcgatttcttccggctcaccgatatatcccatcggaatcatgctttccacatcttttttctgaacgggatcggcaaatttttccgcgttgatcggcgtattgatggcgcccggcccgatgttgttgacacggatgcgcttcggcgcgtactcaagcgccagcgtttccgtcatcaatttgatgccgcctttactcgccgcgtagtggacaaacagcggccacggaatcatctcatgtacgcttgacatgttaatgacgtttccttgaatatcattctctacgtaatatttaatggcttcgcggcttcctaagaaagcgccggtcagattggtattgataactttgttccagtctttaagcggcatttcatgcgactgaaccggattttccatgccggcgttattgatcatgacatccaatgtgccgaattccttcactgcggtctgcacgatgtttttgacatcttcttcttttgtgacgtctccttgaacgatgaccgcttcgcctcccgctttttgaatctcttctttaacggtttgggcgtctttttcattactatagtagttaaccacgactttcgcctgctcctgtccgaagcggatcgccatcgcttttcctaatcctgatgaagctcccgtaatggcaacgacttttccttttaaatccgtgtacatgttcaaacctcctgcatatgttatgaatttgatttcgcaacgcctaagaataccgcggctacaatgatcaggataatcccgatggcaatggcgaccagctgacgcttcgttttgctctcacggagaatgaagattccgccgagcgtgctgatgacgatccccatttgagagagggaaaaacttgtcgcaactccgacgcgcggctgtgagatgaacagaaacatgttcccgagcgcccagatgattcccggcagaatgttcttgagggcgtacttattaaacggtttatgcttgtacgtcaggagcagtccgccgatgaccatcccgatcgcctgcggcagaagcgctgaccatccggatacaccgaacagccgggcgacgacgacatagaccaaatagccgagcgtggagatcagcaggatgacaatgcctttttttaagtttcccggttctccgtccgcccgcccctttttatcttctaaagatgtgagcacaatcccgatgatgataaaaataagggcgagaatacccagcgtaatcgcgatcggggttgaccattctttgaatacgatcacaccgaacaaagaagtcgagacgagctgcattcccgttgatatcggcatcgtttttgaaacgcccatcagctgtatgcttttaagctgattgctttggccgagcgaccaaaacagccccgagatgatgccgacaataaaaatgcgcccggacagcaccggatggacaaacagatacagcacaaacgaaacgatgagcgccccgattgtcgttcccagcgtctggctgtaaggcccgccgcctaatttgacgttaaataacacgatgctcccccaaaataaagccgggagaagagccagtaatatatccatgatggcgaccttctttcaatcgtatttgctgttattttgtctggaatcgaaccgattattcccgcaagatcaaaaaagcctgccggcgatattcaccggcagaccgctcaataaaaaagccccgcttagaagcggggctttcttttcggctcattaaagtccgatagacatgtatttggtttccaggtacggttcaatgccttccgtaccgccttcacggccgatgccgctttctttcattcctccgaacggcgcttgaaccgcggacggaccgccgtcattccagccgatgataccgtattcaagctgttcagaaatatagatgccgcggcggtagttttctgtgaagaaataagccgcaagcccgaacggcgtatcgttcgcaagcttgatcgcttcatcaatatctgagaacgtaacgatcggcgcaaccgggccgaatgtttcttcatgcatgatgttcatggatgtatctacatttgaaagcacggtcggcgtcacgaaatagcatcctttttcgtcgttttggtcatacgttccgcccgtcagcacttctgcacctttttccacggcgtcattaatttgcccgacgattttatcgaagccttttttgttgatgacagggccgacgtttacgcctttttcaagaccgtttccgactttgagtttcgcagcttcttcactcagttttttcgcaaactcgtctttcacggattcgtgtacgatcagccggttcgcacagacgcaggtttggccggcatttctgaatttagaggccattgtttgggctaccgccagatcaagatcagcgtcttcatccacgatcagcggcgcatgtccgccaagctccattgacatatgttttacggtgtcggcgctgtttttcatcaggattttgccgacaggcgttgagccggtaaaggtaattttacggattttcgggctgctggtgaagacgtttccgatttcggctccgtcaccgatcaccacttgcagcacgtccttcggaattcccgcttcatatgcgagacgcgcaagggcgtaagcggaaagcggcgtatcctccgccggtttgatgatgaacgtacagcctgccgccaaagcgggcgcggcttttcttgtaatcatcgcattcgggaaattccacggcgtgatcgcggctaccgggccgaccgcctgacgggtgacgacaatccgtttgcccgttgtcggcgcaggtacggttctgccgtaaatccgttttgcttcttcggcgaaccattcaatatagccggcgccgtataaaacttctccgaccgcttcttcgtacggtttgccgttttctttcgtaattaattccgcaagttcttctttattttcaacaatcagctcataccattttctcaaaagtgaggcacgttctcccgctgatgttttggaccatgattgaaacgcttgatgtgaacgttcaatcgctttttcaacatcttcggccgtctgctgggggatgctttcgatcgcctctcccgttgccgggttgtacactgttaattgttctggcatattgaacattcctttctttcctatagtaaaaccattgaatgcttgttgatgtatctcacactttcatgatagcagacacatccggcgggattccaataattgaactcacagagctgcttcgataatggaaaggccttctttgagctgctcatccgtcacgacaagcggcgtcaggaatcggataatgttgccgttaatgccggccgtcagcagcagcagtccgttctcgttcgccgttttagcgatcgccgcggcttttgctttgtccggttcccgcgtgtacggatctttgacaatttcgatggccgccatcgcgccgagtctgcgcacttctccgatgcaggcatgctcttttttccactcgatcgcttgatgctcgatgatccggccgatctcttcggaacgctgattcagcccttcttcttcaataatatccaagaccgcgagcgcagccgcacagccgagcgggcttcccgcatatgtgccaccgagttcccccggcgcggcggcatcaagcatttccgcccggccgatgacaccgctcagaggcaatccggccgcaagtgatttggatacggtgatcaaatccggaacggcttcgaaatgctcaatcgcaaaatacgttcccgttctggcaaaaccggtctgaatctcatccgctacaaaaacgataccgtgttttttacaaaaagcggcgacgtgctgcacgaaacgttttgaaggaatgatgaagccgccttctccctgaaccggctccattacgacacaggcgacggtttccggtgcgactgcggcgataaagaaatcctcaaaagcgctgatgataaagtcgtcatactgctcgtcgctcatgccggccggcttttgataatagtaaggaaacggcgcttgatacacctctgaggcaaacgggccgaaaccgtatttataaggcttcaccttgctcgtcatgctcatcgtcatgttcgtgcggccgtggaaccctcttgtaaatgacacgacagcctggcgcttcgtatattttctggcgattttcacggcgttttccaccgcttccgcccccgaattgagaaaaatcgcttttttcgcatgatctcccggcgcaagggcgcaaagtttttcggccagctcaatataagacggatacatcatgacgttaaatcccgggtgaatcagatcctccgcctgtttcttcacggcctccaccactttcggatgagaatggccgacattcagcgttccgatcgctccggcaaaatcaatgaatcgtctgccgtccaaatcgtacaaaagcgccccttccccttttaccgccatgctgcggtttccgttgccgacccccttggaaacgaattggtcccgtttttgctgccactgggcagttgtcacttccgatgatgctgttcgactcatagattccatccccctatattgttttcttatcattctgacttctttttggtatgatgaaaagtaccaaaatcaatttatccatggtatcagaaaggagcagggtctggatgctgacgatttccattaatcattcggaaacggcggattatatctatcagcagatctatcagcacataaaagcggccgttttgaaacgcagcctgatgcctcatacaaaggtgccgtctaaacgggagcttgccgagacgctgaaggtcagcgtgaattcagtgaattcagcttatcagcagctgctttcggaaggttatttatatgcagtcgaaagaaaaggctttttcgtggaggaaattgatacggtttatcatgaagaaacgccttcgctctcattgcctgaagatttaaaagagcgggagccggataagagcggctggatttcgttttctcatatgagcgtggatacggcgcattttcccctgaaaagctggttccgctgtgagcataaagcagccgcccgttcatttcatacactcggggaactcgtccatccgcaaggcttatatgaagtccgtgaaaccatttcgcggcttatttccctgacaaggggcgttacatgccgcccggaacaaatcgtgctcggggcgggcacgcaaatgctgacgcagctgctgacggaactgctgccaaaagacgcgctgtacgccatggagaacccgggatatatgaggatgtaccggctgctgcaaaacctcgggaaaaaggttgcgacgatcagccttgatgaaaaaggcatgtccatggccgaaatcgaaaaacgccggccctgtgtattgatcaccacgccttcccatcaattcccctcaggcgtgatcatgcccgcttcccggcggattcagcttttaaactgggccgccgaacagaacggccgcttcatcattgaagatgattatgacagtgaatttaaatatgacgccgatacgataccggcgcttcaaagccttgaccggtttcaaaatgtcatctacatggggaccttttcaaaatcccttttcccaggtctgcgcatcagctatatggttctgccgcccgggcttttgcggacgttcaaagagagagcgtatgacctgcatacgtgcagcacgcttgcccagctcgcgctgaaagaatttatcgactcaggtgaatatcagaaacatattaaaaagatgaagcagcattataagaacatgcgggaacgcctcatttcggctttagaagaaatattcggagaaagaatcagtgtaaagggcgccaatgcggggcttcattttgtcactgagtttgactgcgcccgttcagaaaaagagattttggcacgggcggatgcagaacagctcgatctgtttgcgatgagccggttccgtctgaaagcaggaggcgattcaaataagccgcagctcattctggggttcgcccgcctgaaggagagcgatattcaagatggcgtcctcaggctttaccgggcggttttcgacgcataaaaaaacccccggaattcggggacttatttaccagcggtccggttctgtctgcaaaatcgcctccagcaggccgggaaacgccgcttgtaaatcatctttgcgcagggaataataacggtgcttcccgtctatgcgcacttgggcgatccccgcttcccgcagcactttgaagtgatgggacagcgttgatttggcgacccggacatcagcgcaggtaccgcacgttttttctgttgtttccgccaattgtttgaccagctctaagcggagcggatcactcagagcatgaagaacctttgtcagctgtaagcggtcggtttcaggatggtttggaatgttcatgagtcaaatgtaacacataaaagcggcgggtgacaatttaggcggtgagggtttttcctttaccattcactgcgaaacatgttacagttagttcgataatattcgaactataacaaataaacccaatcaggaggaataacaatgatcgtcttacaggcttacatgaaagtaaaagcggataaacgcgaggaatttttaggagaagcacaatcacttgttcagcattcacgcgcggaagaaggaaatgtgcaatacgatcttttcgaaaaagtcggtgaggaaaatacattcgttatgcttgagcaatggaaagatgaagaagcgatgaaattccacaacgcaactgaccatttccaaggattcgtggcaaaagcaaaagaagtgctgagtgcgccgcttgacgtcgtccgcacagaactgtcagagtaacgaaaggatgaatgacatgaacgaagtccttcaaatattaacagaccaccgttccattcgcagctacacagatgaacccgtatcggatgagcagctggaccttatcatccaagcaactcaggcagcgccgacttccattaacggccagcaatttaccgttattgcggtgaaagataaggagcggaagaaaaaaatatccgaattggccggcggccagccgtggattgaccaagcgcctgttttccttttattctgcgctgattttaaccgcgccaaaattgcgcttgaagaatataatgatacaccgcttgagatcacgaacggtttagagtccgttctagtcggagccgtagatgtcgggattgcgctgggtacggcaacggctgcggctgaatcaatgggactcggcactgtgccgatcggcgccgtgcgcggcaagcctgacgaaatcattgaattgctgaaacttccgaaatacgttttcccgatttccggtctcgtcatcggccatccggcagaccgctccgcgaaaaaaccgcgtctgccgcaagcagccgttctgcatcatgaaacgtatcaagaagaagatttaagaacccatatcgaggcctatgacaagcagatgtccgaatacatgaaaaaacgcaccgacggacaggaaacaagaaactggtcacaaggcatcacttcctactataagcaggtttattatcctcacattcgtgaaatgcttgaaaaacaaggatttaagacggataaataaacgtatcagcctgtcggaacactccggcaggttttttctatttctcaaacaaaagcgttgacactatgtaaaaatttttgttaatattttcatcatatactcattggttttctgtgaaccgatgggttttctattgtgacgaaagaaggaatctgggcttatgaatgataagaaaacggatattctgctggcggcaaggaagcttttttccgggaaaagcttttcgtcggtctcgatgcaggcgatcgcagaggagtgcaaagtctccaaagcatctttgtataagctgtttgaatcaaaggaagacctgctcctggagctgctcgattttaaccagaaacagatggtagcggccgcttcattattaaatgaagaaacgagcctctcccctgaggaacggtttgccaaaaaactgatggctgagcttgaaggcttcaggcgcaaccagcagttttttaatatgctgatgtacggaagcccctcttccattaatgagcgggtaaaacggcatattcacagggcccgctccacctttatctgctggcatcgcgattcactgattcagacgtacggcgaagacattattccttatgtatgggagctggtgatcgtcctgcaggggctcctgagagaatgcatcacgctgattaagctggaaaaagaaccgctcgccctggagccgctcacggactttatcatccgccatctcaatctcatcgtcgaaaacaggaaaaccgaaacggctttgcctcaggagatgattgacctttataccgcctccgcttcctcatttgagccaaaagacaaaaccgtattgctggctgaaagcctgaaggaactgaaagaagccgtctcagcccttccggaggaaaaatatgatgccgcaggactcgcttccgcggcggttatgctggagaaagaatcagcggacaaacagccgcgggattttcttataaaagcgctcatcggttatttggagcaggccggaccgctgcaccagccgcttgcagccgttaaaacattgctcaaactataaagaaagaaggaatcagcttgaataagagtattaaaactgcaccatacaaccgctctgtcattgtcgggattcttttggcgggagcgttcgtcgccattttgaaccagacactgcttatcacggcgctgccgcacattatgaatgacttcaatatagatgccaacaaagcgcaatggctgacaacgtcgtttatgctgacaaacgggattttgattccgattaccgcatttttaatagagaaatttacgagccgcaccctcctgatttccgctatgagtattttcacggtgggcaccattgtcggcgcattcgccccgaactttccggtgctcttaacggcccggattattcaggcggccggcgccggaattatgctgccgctcatgcagacggtatttctcacgattttcccgatggaaaagcgcggccgcgccatgggtatggtcggcttggttatttcgttcgcgccggcgatcggcccgacgctttccggatgggcggtcgaagcattctcttggcggtctttgttttatatcatcttcccgatcgcagtcatcgatttgcttttagcgattattctgatgaaaaacgtcacgacattacgagaaacacagattgatattttatccgtgatcttatcgaccctcggattcggcgggctgctttacggcttctcaagcgccggttcctcaggatggaccagtactgaagtgctgacttcgctgcttgtcggagcggccgcgctgattttctttatcgcaagacagatgaagctcaaaaaaccgatgctggaattccgtgtgttttctttcgggattttcagcctgaccaccctgctcggaacgcttgttttcgcgctgctgatcggaacggaaaccattctcccgctttacacgcaaaaagtccggggcgtctccgcgtttgataccggattaatgcttttgccgggcgcgattgtgatggggatgatgtctccgtttatcggccgggtgtttgacagaatcggcggaaaaggccttgcgatgaccggattcttcatcatcctgctcacgtccctgccgtttatgaatctgacggactcgacgtctctcatttggattgtcgtcgtttataccgcacggcttttgggaacagccatgattatgatgccggtgacgacagcgggaatcaacgccctgccgcgccacttaattccgcacggcacagccatgaacaataccgtccgccaagtcggcggttctatcggtacggcgctgctggtttccgtgatgagcagccaggccgcgcacgccaatgcgtcaactccggcaaacgccgccctgcacggcatgaatgcggcctttgtcgtagccgcctgcatcgcgctggccggcttcctcctatcttttacattgaagaaaaaaccgcgtcagcccgagcagcagcaggccgttacgcggtaaaccaaaaagaacccgatcacgtatgtgaccgggttctttttttacttctcgattccgtcttttacttctttcaccatttgcgccatggattccaggccgcctcctgataaataccatgtagctgaatcaaggtagacaacatggttgtttttcacggctttcaccgattttacataatcattttcaaccacttgttttgttgaagattttgtgccgatcgctgttccgcggtcaacgacaaacatgtaatcagggtttgttttggcgatatattcataggaaatgctttgtccgtgcagtgaggcttcgatgtttttgtcagccggtttgacgccgaacacatcatgaatgaagccgtatcttgatttagacccgaacgcgctgattttgccgtcgttcgccatcaccactaatccgtttttatccgtgctgcttgtctttttcttcagatcggcaatggatttgtcaattttcgcaagcttatctttcacttcattttctttgttaaagattttgccgatcacttcggtgttttgcttgaatctgtcaacgtagtttgtatagtcatcatcaagataaatcgtcggcgcgatttttgagaactctttataagaatcagattgtctgtgggcgataatgattaaatccggatcaatatccgcgactttttcaaaatccggttcttttaaaccgccggtattggcgtatttatcactattatatgaagataagtattttggaaggttttgtttcggaagtcccgccacgtgatcctgtaaaccgagttcatccatcgtatccagcattccgaagttgaatacgacgacttttttcggattcttcggcactttgactccttctttgttcagatcatctttgattgtgattgtttcttttgatttgcctgatgttttgtccccgtttccgcatgcagaaacaacaaaaatcgtaactagcgcaatgaatagcaatgcgaattttttcatgactttcacctcatctggtttttaagaaaagtacacaccgatccgctgactgtcaatctcttgaatcgggatggtcatatcataaatatcttcaagcacggaggtttcaatgatctcttccgccggcccttctttgacgatccgtccgtttttcagtgcgacgatatggtctgaatatacggatgcgaagttgatatcgtgaatcactacgacgaccgtttttccgaagtcttccacaagccgcttcaacagcttcatcatttcaacggaatgcttcatatctaaattgttcagcggctcatcgagaaaaatatagtccgtatcctgagcgatgatcatcgcgataaacgccctctgacactggcctccgctgagctgatcgaggtatttatcctttaagtcatccagcttcatataactgagggcctggttgatatgcacccaatcttcatccgtcagtttcccttgggaatacggaaatctgccgaagctgaccaggtctttaatcgtcagtctgatattgatttggttcgtctgcttcaggatgctgatttttttcgccagatcgttgcttttacaggccccgatctcttgcccgtcgaccgtgatttctccggaatccgtcttaatcagccggctcatgatagacagcagcgtgctttttcccgcgccgttcggaccgataaacgaggtgagcctgcccttttgaatggatagagacgttttctcaaggacggttttccctccgtattgtttgcttacatttttgacctctaccatgatttattctcctttaacagcagatagataaaataaatcccgccggcaaaattaatgatgacgctcagcgtcgtggaaaacgtgaacactttctccacgacgaactggcccccgacgagcgcgacgatgctgatcaggacggaacccgcgattaaatacgtgtgcctgtaggtttttaaaaactctctcgccagattgacgacaagcagtcctaaaaacataatcggcccgacaagagccgtagagacagacacaagaatggcgacgacgatgagcatctgtttcacaagcttatcgtaatcaatcccaaggttgacggcgtgctccctgccgagcgacagcacgtcaaaaaaccgcgtgaaccgccagacataaatgcctgtcagaagaaagacagcaccggcaaatcctaaaagatcggtgttgatattgttaaagctggcaaacattttgtcctgaacaacctggaactcattcggatcaatcagcatctgcataaaggatgacagactgttgaacagcgtgccgaacacgacaccgacaagcagaaggaaaaacacgttccgcccctcgcctttaaacatgagctgatacaaaacgagtgacaagagcaccatcagcccgacggagatgacgaaattaagatttttgttcatcatgacgatattcattgaaccgaacaggaacacgatgacggtctgaatgagcatatacagggaatcgaggcctaaaatgcccggtgtcagtatgcggttatttgtaatcgtctggaagatgaccgttgaaaacgcgatcgctccccctgtgagcatcatggcaagcactttgaagcatcgtctcggcagggagtattcccaattgcccagtccgtagaacagaaagaatccgatacatattatggcgagcgccgccagcagcgtaatttttttattatgactcatatgcttttctccttaacagcatatacaggaagatgccgctgccgataacaccgaccatcaggccgatggaaatttcgtacgggaagatgatcacccttcccaaaatgtcgcaaaacagcacaaaaacagcgcccaagagagcggtgtgaggcaggctgctcctcaggttgtcccctttgtaaatcgacaccatattgggaatgatcaaaccgagaaacggcagcatcccgacggtcaggatcaccagtgaagcgatgagcgacacgataatcagaccgatattgacgacgcgtttgtatttcaggccgagattgacggaaaagctctctcccattcccgccaccgtaaatttatccgcatacacataagcgatgatcaccagcgggatactcagatataaaagctcataccggcctttaacgaccagtgagaaatctccctgcagccaagatgacaggttttggatcaggtcgtatttatatgcgataaacgtggcgattgagctgacgatgttcccaagcattaaaccgacgagaggaataaaaatcgcatcattgaacttgattctctcgaggattttcatgaaaaggaaatttcccgccaacgcgaaaataaaagcgatagacattttcacaagcgggctcgctgacgtaaaaagcattaatgaaatcaaaattccgagccttgcccagtccatcgttcccgcagtcgtcggcgatacaaatttattccggctgatctgctgcatgattaatccgcagatgctcaggctcatgccggcgatgataatgctcaccaaacgcggcagccggctgtcaaacaatgtacctgcctgttctttatttaaatgaaaaatatccagcggcgacaaatcttctacaccgataaatatagaagtacacgccaaaaccgccagtagcaaaagtaagtaacgtagcttcatgctgcctccctgcacccatcacaaacggtatgactgattgccaaacaactcccatatatccccactcgtaatgattatcattatcaacgacaactataatcttatcatctttccaagcgcagtcaatacagttttgctttcaaaaacggtcatccgcgggccgtacactaaattgtcttacaatcagtctatcaagaatttgcaggattttctataaccttcatttggctgcttatcattttttgcacatgatgacacgcttgcgggaaacaaatctgacaaacagcggcaaaattcctccacgaaaatacaaatgttctccccacatagaaaaaatccttgatttacatgtttgaaagagagataataaaaattaaatttgtgagaaaatttaaatattaggggatgtaaatcatgaaagttgtaaaattcggaggcagctctcttgcgtcaggagcccagcttgagaaagtgtttcaaatcgtgacggctgatccctcgcggaaagccgtcgtcgtatcggcgccgggaaaacgcttctcggacgatacaaaggtgacggatctgttaatccgctgtgcggagcattatttgcaaaatggtgcagcgcccgagcttgccgaaccggtcattgaacggtacgccgccatcgcgcgtgagctgaacctggatttctctattatagaaagaatccgcagtgacctattcgctctcttaaacagcagcaaagccaatcccgatcagtatatggatgcggtgaaagcgagcggcgaggacaacaacgcgaagctgatcgcggcctacttccgccggcagggcgtgaaagccgaatacgtaagcccgaaagaagcggggctgtttgtgacgaatgaacccggaagcgctcaggtgctccctgagtcttatgatcatttgtaccgtctgagaaaccgtgaaggcttgatcatttttccgggatttttcggttacacgaaggagcatgagattgtgacgttttcccggagcggttctgatattaccggctccattctcgccagcggcttaaaagccgacctgtacgaaaactttactgatgtggacgccgtctattccgtcaacccgtcaatcgtgcggcatccgaaagagattaacgaactgacgtatcgggaaatgcgtgagctctcctatgccgggttttccgtttttcatgatgaagcgctgattcccgcttttcgggccggcatccccgttcagattaagaatacgaataatccggaggcgaaaggaacgcgcgtcgtcagcagccgtgacaatacgaacgggccagtcatcggcatcgcaagcgacacgggcttttgcagcatttacataagcaaatatttaatgaaccgggaaatcggtttcggccgcaaagcccttcacattttggaggaagaaggattgacgtatgaacatgttccatccggcattgacgacatcacgatcatccttcggcacgatcagatggactcagaactggaacacaggctcgtcacccgtctgaagcaggaacttcaagcagatgaagtcacagtcaggcacaatctggcgctgattatggtcgtcggggaagcgatgcgccataatgtcggcacaaccgccagggcatccaaagcactgtccgaagccggcgtcaacatcgagatgatcaatcaggggtcatcggaagtcagcatgatgttcggggtgaaagaagaacaggaaaaacaagcggtgcgggcgctgtatgacgagtttttcgccggagtcttactcccataggacaccgcctcttttttctcttgtccactaatatcccttacaaagcagcttcttttacatattgtatggtatagacaatatggaggtgaagctcatgtcaggatattctggaatcagctctttcgctttgatcgttgttttatttatcctgttggttattgtaggtactgcctatgttggcggtttctaagcatcactccgtctatatgaggacgctgcgggttttgacctgcggcgttttcttttgttttccgccgctgtccaagtccggccgcgcaaaaaaaagactgccgggaacattcccgggcagtcttttcctttgttcaggttattttcttctcacgtcattcctctttcagctacatggaattcagcctgatctgtctggcctgcacctgtcactgtaaaaatcgcggcggctgctaaacaaataacaaaccatttagatttcaatttcatacaaaccctcactcctttgtatttgtttccttgcctcttcgactttcagaaaatagtcagaagaaatcttaaagcaattttgttcatagtaatatttagctgcttctagtgctaaatcctctatatcggcgtataaatttttatcttccaggtaacggaaacacgcgctgattgtttcctcatccggtttcgcctgatacagagcctgcagccattcgaattttaccgtgtaaacgggatcgtctgtttctttagcatattcatatccccgcttgtgatattccgacgctttttctttttttccgagtttaaagtaaatgagtgtgattaggaaatatgcttgaggaagagaattgacgattctttgtgattcaaatgtatcaaccgcccgttcaaagtacggaatcgcttcgccgatgcggtcctgattgtagtagcacagtccgaggttatacagcgccctcccgacaagctgcgctttttgttctttttcggccatttgcaaagcgtgctgaaaatgtttggccgcctgttcaaagcgcctttcatccattaaattgacgccgaatacaaaatggcattgaatgatcctgacgttatatgtgtcctgctctacgtaaatttcataagcgttttttatatgtatcaaagaaaaatacgtttgtttcatatgataataagcttcggccactttaaaataaaactccgcccgttccacgtggtccgatacgaaggccagttttttctcagcttgtttataatacgtaatcgctgagataaattctcttttatcaaattcaaacatgcctttgaaaaagttgacgtaataatcgagaagccctttgaggccggcctggctgttatcaatgttatcaagaatttccgacagggtcggctggtcttctatcttcagtttttccagcggctccaagtagtccagcatcagctgatggcgaaattccatgagggaataataaagcactaagtttgaatcaggctccatacggtcaagctcttgtttgatctcggccttcaagatctccgcatccggcacgctgaatgttctgatgtatcgataccactcgttaattttctgcccgactgctgaagaaggaattaacccgctcttcattccttcaccctccccatccaagacctgtttaccagttattttatcacgtttccgtgtctttccatcccgaaaaacacgcaaactttgtttcggcagagcgcaattttccgagtgaagataaaacagccggtagccagacgggactgccggtttcaagatgattcatgtatcgtattcagcggaaggcggattgtaaacgtcgtgccttttcctttttcgctggcaatatctatcgtgcccttgtgcatttcaacgagctgcctgacgatggacaggccgagtccgtattcgccgtatgccgtattcgtccgggacacgtccgccttataaaaccgctcccatatatgctcaatttcctctttggagatgccgattccggtgtcttcgatctcaatcaccgtttctttatagccttcatacccgcgcagcgtgatgtctccgttttgcgtaaattgaatgctgtttttcgtgatgttgacgagaatctggatcagcctgtcataatcggcgaacactttgacgccgtcctccgcctgaatccgcagctgattttgtttttcctccgcctgctgattgagatgctctttaataatttcaaacacctcgatgagcggcagactgagcttgtccagtttgatttgctgggatctgattttttcataatccagattttctttcacgagcctgagcatccgcttcgtttcttcactgatcagcgagaagcatttctctttatctttttccgggatggtgttgctgttaagcccctccacaagtccgttaatggtcgtcaaaggcgttctcagctcatgggagacatcggcgataaattggcgcctccgtttttccaggcggtcaatctgctctctcgattgcttcagatttttggccatgatgttgaaatcggacgccagcatgccgatttcatcgccgccgctgttcttgagcgaaatatcgtaatccccggatgccacttttccggtcgcatcccgcaatgtctgaatccgcttaacgtgaaatttagataaaagccagctcagcagaatcgtgatgataagggtgctgataatcgcgtaaatcatatagcggttgacctggctgatcatctgctcgacccctctgacgggagacacgagcagcaccgcgcctttaaattgatcgttgatcaaaagcggttttgcgacaagcgatacttccaagccctccgtattaaaacggttcatctccgctctgatctgaacggttttcccttgcttcagcatgtgccactctttacttttgagcttctcgcgcggcggcatatcgtcaggaaaaaagtaaggccgctgatgttcatcaaaaataataaacctggtctcgcgcgtttttaacatgtcctgatacggatacaggcggcgcagatcaagatcgcgtccgttcagctcacttgtgatctgctgggcgtaagaagacagctcatccactttattttgatacgcaaaatctttcacaaagtgcgaaaacagggaaatgataatgaaaaaggccaaaatcaaaatgctgacatggcttaacagcagctgatataagtatttaatcctcatcaaatttgtatcctaccccccacaccgtgtataaaaacggtttttcctcactggacagttttttgcgcagccgtttaatatgaacatcaaccgtacgttcatcgccgtaaaattgatagccccacacctgctcaagcagctgctctctcgaaaagacctggcgcggattttgtgcgagataaaagagcagatcgaattccttcggcgtcagattctcgacaggctttccatgcagaaacacttcccgcgtcttcttattgattgaaaaacacgccgtttcgatcaagtcgccgctttttacggcctgccccgtcgcccggtatcttctgatcaccgctttaatccgcgctactagcgtcagcgggctgaacggcttggtgacatagtcgtcggctcccatttcaaacccgatcacctgatcagactccgtgtcctttgcggtcagcataataatcggcacactgctcgtctctcttattttccggcagatcgtcactccgtccatagatggaagcataatatccagaatgaccaaatcccagtcctcttccgtgaaccgctgatagccttccactccgtcatggacaaattcggcttcaaatccttctttaaaaaagaacatttccgtcatggtgcatacgcttatattgtcttctatcattaatatcttcattgggtcctccgtttatcttgacgcttttacttataatagcaccattttacccggatattttcgcgtttcacaattgttagtttttatttcatcacccggaaatagtttgttcatatttttttcatacatttctcctactatatacatatcggataaccggttctaaagaaggctggttttacaagatctgacacccacacggaggaacagacatgaactttataaaaagagccttttggagcatgaaggcaaaaaagggaaaaacgtttttgcagctggttgtgttttcagtgatttgcatttttgtcctgtccggtcttacgatccagtcagcggcaaagaaatcaagcgaactggcaaggcagcagctcggcgggagcgtcacactccaggctgaccgccaaaagcaaatggcgcagcagcaaaaagacggtgaaaagaggacgtttgaatcaacgccgatttccgtctcggatgccaagaaacttacatctttacagcacgttaaaaattacaacttcctcacgacagcgtcagcaaacgcagaaagctttgacgcgataaaaagctcagacgaatcagccgataacagttccggcggaagccgttttcaaggcggcggaagacagatgatttcagcggatatttcggtcgaaggcgtgctctctacggcgctgcttgatgatttcacaggcgggagctcaaaaatcactgatggccgcgccatcacaaaaacagatgcggacgcaaaagtcgcagtgatcaatgaaacgctggcagatcaaaacaagctgaaggtcggcggctccattacagtttcctcagcagcggatgattctgtgagtacaaagcttaaaattgtgggaatttataaaacaacatcatcaggagacgatcaggcagagcatttttcattcttaaaccctgacaataaaatctatacgccttacaccgcagctgcggcgttaaaagggtctgataacaaaaacagaatcagctcagccgtttattatatggatgatgcaaaatatattgactcattcgttgcggctgcgaaaaaaacatctatagatgataaaacctacacgctgacgacaaatgatcaggtgtatcagcaaatggccggcccgattgaaaatgtcgcgtcattttctaaaaacgtggtgtaccttgtatccatcgcgggcgcggtcattctcggattgatcgtgatgatgtcgatcagggaacgcaagtatgaaatgggtgtcttgatggcgatcggcgaaaagcgctggaagctcatcggacaattcttaacggaaattctgattgtcgcggttatcgccatcgggatcgcatccgtcacgggcagccttgtggcgaatcagctcggaaatcagcttctttcccagcaggtcagctcagccgatgattcccagcagcaaacaagcggctggggcggaggagaaatgccgcggggagacggcatgttcggtcagcattcatccggtgcagatgtcatcagtacaatgcaggtaaacgtttcgctgaatgaccttctgattctcggcgggatcggcgtcgcaattgccgtcatcgccacattactgccgtctgtatcagtcatgcggcttcaccctaaaacgatcctgaccaagcaggaataagaggaggcagcataatgagcctattaacctttcaacagatcggctactggtaccaagataaatcacagccgctgtttcaggatataacgatcagctttgaaaaagggaagttttatacaattgccggcgcctccggaacgggaaaaaccacgtttctgtctctggcgggcggccttgacacacctaaagagggaagcatcctttataacggagaagacatcttcaaaatcggattaaccaaattcagaaatcaatatgtctctatcgtctttcaatctcatcatctgatcccgtatatgacggcgctccagaacgtcacaaccgcgatggagattaccggatctaaggagaacaacaaagatgcgtccgcgctcagcatgctggataaagtcggcatcaccgaacagcaggcccgtcagcgggtgctgacattaagcggcggacagcagcagcgcgtttcaattgcgcgggctttctgctgtgacacggatctgatttgcgcggatgagccgacgggaaacctcgacgaggatacgtcaaaggaaatcgtccggctctttcaggatctggcgcataaagacggcaaatgcgtcatcatggttacgcacgacgaacaaattgccaaagtgtctgatatcaacatccgcttatcaagaggaagtttcacggtcaaagaaaacggcacggccgtttcctgataccgcgcccctgccagcgcagacaggggcgcaccctatatccccctattcaatagaagtgaacgtaaaaagagccagggctgcatcccctcgctctttttatttatatcagctgtaaataacggtcaatatttgattgtccggctgctttgatcaattcttccgcctttttctcttctcccggcaaagcgagccggagcttgtcttcaatgtctttttcagaaagaccgtttcccggcgctcccctcggacagtcgatacgtgcttcatagacatgaccgccggaaaccgtgacccgtacaattgtaaaacggcccttcggaacggcgttgtcagccggctgaatttggtcatcgcagctgcggtgaatccgctcaaatcctttttgaagggattgcggaatcggctcggatgtgaaatgttcaactgaaaaatccttaccgtgcaaagctaaggtgatcacatattctacgctgaaccgacccgcttcgcctgttttcggacgccgttctgtcaatgcggcgtccccgcccggcggataaatcacgtcaatccgttccgtttggccgaaagtgagaccatgttcggccttcagcttgagaatggcgtccgccgcatgatgggccgccgagcaaaacggataaaccttaaaccaaagtcccggactcacgatccgccaagggtttccccacccgtttacaagcagggtttctgcccgttcaagatcgccgtacagtccgaaaaaacctttctccccgtcgagcgcatgagctgagccgccgaaaccggcctttgcaagctttacggcgaacaccccggcttgagcggccaggccggcgtggagcggcttcatttctgtcccgaattgcactctcatgcctccggaacgggcagccgcaaacccgattgctttctgtaattgggtttgattcagattctctgcgaatccgacggcgcatgcggccgaaatggcacctaacgttcctgtattgtgccagcctttctcgtaatgatcccttccagctgactcgccgagccgcgccatcacttcgattcccgtcacataagcaccgagaaaacggctcttgtctatccggccggctgatgcggctgcaatcaaagccgggaggatgaccgcgctcggatgtcctcttacatcagaatgaacatcgtcaaaatcaagcgcatgtgcgatgaagccgttaatgagcgcggattgggacggcgtggttttttgatttctgccgataagcggcgctatcggcatcccgccttcttcttcggccagttttaccagcttttcaactcctgtatcccgtctccccgcaaaagcagccgctgtaaaatcaagcagtcctttgcgcgcttctttcatcgcttcggcggatgtttccggcacagacgacatgacggcctgagcaagtccggccgtcagattttccgtattcattccgtctgctccaatacattgacggcaagccgggcgaaaaactcagccgctttcggaagcgctttttcgtcgagtgtaaaggctggatggtgccattcttctgttccgtttgttcccatccagacgaagaagccggggattttttcttgatataatgcgaagtcttcgccgccgggcgactgttctgcccgaacggtttgaagtccgaggctttcagccgtttgttccgccgcctgtatgaatcgggcatcgttcatcactgacggcaggtaaggaaaccagcggaagtcagcctctgccccgaatccggccgcgattccttcggcaacccgcttcatatgtttcggaacagcgtcccgcgcttctttttgaaacgtccggacggttccttccatttcaacatggtccggaatgacattccaagaactgcccccctgaactcttgtgatgctgacgacggcattgtgaagcgagctgatgtttctgctgacaatcgattgcaggccgccgatgatctgccctgtcgcctgaatcgggtcaatgctgttgtcggggattccggcgtggccgccttttcctttcacggtgatttcaaagcggtcgacactcgccataagcgggccttctttcagaccgaccgtgccgacggggaggtcaggtttgttatgcatgccgaatatcgccgatacaccgtcaagcgcgccggcttcaatgacctgtcttgctccggcggcgatttcttccgcgggctgaaaaataaaccgcaccgttcctttcagctcatgctttctctcatttaataagaaagccgtgccgaggatagatgccgtatggaaatcatggccgcatgcgtgcatcacgccgctgttgcgcgaagcaaacggaaggtttgttttctcttcgatcggcagtgcgtcgatgtccgctctgacggcgatgacggggccgcttttatctcctttgatttcagcgatcactccggtttgaagtttcggcacatcaagaaccgtgattccttcttcctccagccagcggcggattttattcgtcgtttcgaattcctcgcctgacagctcagggtgttcatgaaggtcgcggcggatattgattaaacgtttgtttaatgattcatacgtttcatttgccatttcttcttcttcccttcttagacaagttcggcaggctctcccacttgcttaatgaattttttcgtccgttcgttctgcggattgtcaaacagctcctccggtgttccctgttcgatgatgcgtccgtccgccataaaaataactttgtcggctacttcacgcgcaaaagccatctcatgcgtgacgatgatcatggttgtctgtttttcggcaattgatttgatgacttggagcacccctgctacaagctcagggtcaagggctgaagtcggttcatccagtaaaatcgcgtgaggatcaacggccaaggctctcgcaatcccgatccgctgctgctgcccgcctgacatcgtaatcgggtagctgtccgctttgtgttctaaaccgacttgccgcagcaggtccataccgatctgttccgcttcttttttcggtttcttttgcgcggtgatcagcgcctctgtcacattttgcagggcggttttgtttttgaacaggttgtaattctgaaacaccatcgccgtctgctggcgaagcttgtgtacgtctttgcgcgaataggacgctgcattcagctttgcatcgccgatttcaatgatgccgtcatccgggcgctccagcagattcagacagcggaggagcgttgattttcccgagcctgacgggccgatgatggccgtgacttcgccgcttttgatctcaagatcgatcccgtcaagtacggtaagatctttaaatgcttttcgaatatgtctgacttgtatcatcctgagcctcctcctatgtgcgataaggcttgctgatcgcccgttcgagcagatcctgcagcacactgtaaataatcgtaagaatccagtacatgaccgcgacggctaaatacgtctcaaaatatttgaggttgcccgatgcgtacatttttccttgggcgaacatctccatcacacctaatgtaaaagcgagcgatgtttcttttaacaggccgataaacgtatttcccgtcgcgggaagcgcgtttctgacggcttgcgggaaaatgatccgtctgtacgcctgggattttgtcattccgacagacagacaggcttcaagctgcccctcatcgactgagttgagcgcagcgcggaagatttcagccaggtaggcggcatttttcaggcttaacccgataatcgccgcagttaacgccgtcatcttgctcatcccgggaaagagctgaggcaggccgtaataaattaagaaaagctgcacgagcgtcggcacgccccggaaaaatgaaatatacacctttgacagctggtgaagcacaggaatacgattttttgtgataagcgctaatataaggccgccgatcacggcaaataccatggccgcgacggccattagtaatgtgatcggcaaggcttcgattaacgcgggaaaagctgaaaacataaatccccaatcaatgctgttcattctcgattttcaccgccgtttcttattgctttgcttcctttgtgatatcttcgttaaagtacttttcagacagctttttcagcgtgccgtctttccgcaggtcttcaatggctttgtttacttttttgcggattttatcgtgagccgcatctttcgcaaacgggaaagcgactttttcatagacaatcgggtctcctgctaatttcagaggcagaccggtctttttgatctgggcgatcaggacgctgcggctgtttacataggcgtcaacccgtccgtaagccacgtctttcagcgtaccttcttgtgtttcatatgtttttatgttgatttttttatccgggtccttgctctcaaggtttttcgcgtggtttgagcccagaacggccgccactgtttttcctttcagatcattgactgatttgatgtctttgttatcgtttttgacgacgacttgagtgcccgcatacgaatacggttctgtgaagttatacgttttcttgcgttcgtccgtgacagcgacctggtttgaaatggtgtcgagtttgccggtctggagctcgcccatcagtccgctgaactcaagcagcttccagtccagtttcatgttgatttttttcgctacggcttccattacatccacgtcaaagcctgtcagcttgccgttttctttatatgcgaacggatagctttgtcccgtagcgccgacatgcagcacgttatcgccgccttcgctttcttttccgtttccgcatgctgttaagaccgccaaaagcgcggcagacagcagcaaagcccatgttttcttcttcattgaaatcccgccttttcctattaaaatgttaatcctgcaattgtttttttaaatagatggtgatgtggccttttcctaaatccttttcgcctgcgcggacgtagcctttccgctcgtacatgccgatcagccacggatgcttgtccgctgtgcccagtgacacgaaaggcgcttttaatgtatcgcggagcactgtgttctccagccactccagcatgtctgagcccgtccctttttttccggtttcaggatcgacggcgaaccaccaaatatgagggacaccgtacggcccgggattcggcccccacggcatccgcagagaaatcgtcgccagaatccgtccgtcttcctccaaaacgtaacaggcgtttttttgtatgttattcaaaacgagctccttatccgccgttgctgcggcaaagttgatgccgagcttgcggatcggttcatacgcccgcagtgtcagtgaaagcagctcatcagcgtctgcctccgttgcgagccggtattgtcttgacatgatgagccctcctttagtcggcatatcggtttgccggtttttccagtccgaaatgttctctgagtgtggttccttcatactcttttctgaacacgccccgttcttgcaaaatcggaatcactttgtctacaaaaagagtgagaccttcaggcaaaagcggcggcatgatgttgaagccgtcacaagcttgttttccgacccattcttccatcttatcggcaagctgttcaggcgttccgacaaagatatgatggcctcttgaacccgccacatatttgtacagctcgcggatggtcatgttatcgcgtttggccatctcctgaacgagcttgaaccggcttttaacggcattcgacgcatccgcatccaattcaggcagcgggccgtcaagcgggcaggcggaaaggtcgacgccgcccagatagttttgcagaatgttcaggccgacagacggaatgatgagatcttggagctcttcatattttgcctgcgcttcttcctcggtatcggcgataacgggaaatatccccggcatgatcgcgattttttcaggatcacggccgaaagaagccgcttgttctttaatagattgatagaattcctgcgcggactccaaatgattttgcgcggtgaaaatgacctccgccgttttggcggccagcgcttttccgtctcctgatgatccggcctgaataatgaccgggcgcccttgaggtgtgcgggcgacatttaacggccctctcacggagaaatatgttcctttatggttcaattcatgcattttttctttatcgaaaaatgctcctgactctttgtcacggataaaggcgtcttcctcccacgaatcccataatcctttgacgacttcaacgaattcttccgcgcgctgatatctgagatggtgctcaagatgcttttcgccgctgaaattaagcgcggtcgattcaatcgaagatgtgacgacattccagcccgctcggccgttggaaagatgatcaagcgatgcaaattgtctcgcgatatggaacggttcgctgtatgtggtagacgcggtcgccgtcagaccgatgcgggatgtgacctgagcgagcgccgacagcagcgtaaacggctcaaagcgcgtcagcacattcggatgtgatttgccgtctattgataaactgtccgccaaaaacagcatgtccaatttcccccgctcagccgttttcgccagttctttgaaataatccaaattcatgctcgcgtccgccggtgcctgaggatgtctccaagaagcgacatgatggccggtgcccgcgagaaacacaccgagtttgatttcttttttctttgtcatgatggatctccttctattctgaaatacggttcggaaaatattaacaccactaaacctatatttcctagtaattttataagaataaatcaaaatgtacaattgtcacgcaagtttgtcaatgcattaagacaaaaatcatgattttaaaaataacccggcgcaccgtccgggttatttcttcgaaactgtatagacggtccctttgacctttttcttaataacggcaatgataagcagcaaaacgggaaacagcacttgaaacggaagatgaatatagatcggcacaatgtttaagccttcattcatgtgttccgaaaaattgcttgcgatgctgatggagagaatcagcacccccaatccgaccggaaaggccagctgagacggatttttttctttaaacagcgtggacacacccacgacaaccgcatatgtaaaaaggctgactttgaaaaaaccgccgatgacgagcacgagcatgaaaaagacatccagccggtctaaaaactcttctactttaatcgtctgtatggtgctcagcagcggaaattgagagcggagcattaagttgacgtccagcacacaaatattaatcgccactgacatcgccaaaaacagcccgctgatgataatcgccagaaatccggttttcttcacctttttccgatcttttaaataagggaaaatcatgacaaacacgattaattcaccgaacgggatgaacatcgtctgtttaaacacggaataaatgaccgttcctgcaccctccgctaaaacgggctggagaaatctgaggtttatcgtgcctgagctgataatgaggatcagcccgacggctgtcagaaaatacataatgccaaacagcagctcgccggctctcgctatcacttcaataccctttctgaccgcaaatatcgcggcgatcatcagcatggcattcacaattaaaagcggcgtgtcctggtaggcgaaggtgacaagcatttcgccaaaatcccgcaatacgcgggccgcgatataagaaaaatagagaatataaagaagcgagaccgcccagctcagatgtctgccgatcagttcgttcatgtaatctctcggagaagactcaggaaaaaattgatacagcgcctgataaacgtagaaaagtccgagaccgataacgcacccgagaagcacggacagccatgcatcccgcccggccatcgtgcctggcgggatcaataacgaactgcccaattcaaacaaaatgatcataataaacagctgacgcgtgccgattttcgcattttccatacgcttcgctcctttctcctcaaatcaatcatgctcaagcttgtctgagagaggattattccgcaagcccgttcttctgataatgacttccgttttgacatctacggggagattggggaaatattcttcatcccacttccctttgaactttttccatttgtccggatgcttccgatagatcaggtctccgaagccgacgaagtcattcttacgggcttttatatcttcaattgatttggtgatatctttgtcaagctgcacgctgagcgccttttgcatcgtcatcagcacttgcggatcagacagatggaaagggtatctgacagcgtccaccagcccctcgacctgagcatgcacgtgaatatgcggttttccgttcggaaaagtggccgtcacctttgtattctggcgggtgacctgcagactgattgcgtgcttcacattcttccaatccgcattgatgaacgtatgcttgatcctattgagcagccatacagcccccacactgtcgtcatcctcaatccagtaatccagcctcccatcctttttgaacaccgccagtccgtccgctgacagcactgctttcggttcagtcgtctgcgtattttccatcgtaggaccggctttatcgtctccgtgcatttcataacccggaataaacggcgacccggccggagaagcgagatcaatcagaacgtcctgaaggctggttttaatgactctgccgtattgttcctgcgtgaagctgagcgtcttgttcactttattggaagggattttatcaatcggcgtcagcactttaataatgtcttcagccttgcaattatgcgcgatcaccgcggttgcggtcgtcctgaattcggtgtcgcggtcaagattgtccagaataaaactgagcccttcctctttcgccagcttttcactgaacaccacgagattcgtatgcgcaaaatagagccttctggacactttcatcgagccttttctcaaagcttccgtcatattgtctccggacaccgaatagacggaaaccggaggccggtctcccgctccgccgccctgcagaccgccggccacgtttcccggattgataatttgcaagtgaaggacgtattttcccgtttcggtccggtcaataccgatggcggagatcacagccaaatcagtcagctcccttttatcccagcatccggatacaaacataagggaaaccatcgtacaaaggataagtatccatttacgtcttttcattaccgtcgccctcttctacatctttattaaccatccctctggatgtctccggtttcggtctttgatgttccccttggcgcctgttgttttcctgcacgagcagttccggccttttttcatctgcccataacggagcgcggaggatggaatccttcagcccgcccggggtcaaaggagcgagcggggacatatacggaaaaccgaatgaacgcaggccgcacagatggacgaacatcatgataatgcccagaatcagcccgtaaaatcccatgaccgccgctgacagaataaagagaaaccggatcagccgcgcggatatcgccatgtcaaaagccggggtcgcaaagctggcaatcgccgtcagcgcgacgacgataaccatggccggggagacgatgccggcctgtacggcggcctggccgatgacaagcgctccgactatggaaacggcggagccgacaactctcggaagccggacacccgcctccctgagaatctcaaaagccacttccatcgtcagcgcttcaatcacggccgggaacggcaccgtctcccgctgagccgcgatgacaatcagcagctgcgtcggaatcatttcctggtgaaaggtcgtcgccgccacataaatccccggcgccaccagtgaaatgaagaaaatcaaaacccgcagcaccctgatgcttgtggcgatatcaaatcgtgaataataatcctcaacggattgaaaaaattgaataaataaggccggcgcgatgagaacgaacggcgttccgtccacgataatcgcaaatcgtccttccagcagattccccgccacgacgtccggccgctccgtatgatatacggtggggaacacagaaaacggcgcgtcttcaatgagctgttcaatgtagccggattccaggatgctgtcgatgtcaatgtgcttcagccgcttgcggacttccttaatcagctttttatcgcaaattccgttaatatacatcagcgcgacatccgtattcgtttcgtgtccgatctccattttttcaacccatacatcaggcgtttttacatacctgcggatcatggaaatattggtttgcagagattcagtgaatccctggcgcgggccgcggaaagagacctgagtgctcggctcttgaatggaccggtgctctcccccttccgtgctggcgatcagcgccttgtcagccccgtcgacaaaaatgagcgtgctgcccgccaccagcccggcataaaggcttttccatttttcttcctctttcaccccgccgatcgcaagcgttttatcgtatatcaggcagaccgcttgttccggctgaacggacgggatatcgattaaatcctccagaagggattggctgacaagctgttcgtctaccaaaccggcgatatacacgattgcggccggaagctcttcttttccgattttcagccggcggatgacgacatcggcactgttgccgaacctctcagacagcttcttcatattttgctttaagctgagggagatcggctcatcccgctctttgtccggctggctgtccgcttcttttctgccttcattgtcacggtcgttttgatcggcttttttttgtttcctctgcttaaaaaatggcggcatatcgcaaaaaacctttcctcgtttttttcatattcttcctgtacggcaaaagattatgcacggcggaaagtctgtataagttctgcgtaatcgaaaaggataaaaagggagagtgatgcgcatgaaaatattaggggtttcattctttttgctgactgcctgtctgatcatttcagtaacggtggatatgctgcaaggtttcagtttctatggagcggttcaaaacaacctgtccgcttttaaattgaccaccttctcagaatggctgatgctgtttttattcgccctctttttaatcagagaaatgatcgctttatataaatcaggtaaaaaagatgcctgacaggcgcaaggctgtattgtgtcaaaaaagaacacattcctccttctctcggagttcatgtgttctttttatttttccggcgcagattgttctcagatgacgatatttccgctttccgtatctgtcgcgtgcttcacaatgacgcctttgataatgcggttgccgatgattttagtacttgcggaggagctggtttggatggcggaagcagaagcggcggataggttgttgatggtattgcccgaaacgagggaattggaggctccgttcagatagatgccgatcgggctgcccgctgttcggttgatcgtgagcgtattgtctatgacttcatgcgtgcctgagttcagatacacggtaacgataagcggtgatgattcaaagcggttgctgatgacagaggttcccgaggatgttgaactgaatacgggatagtttttatagttcttaaagagattgcctttgatgacagccccggcgtcatttgtcacagatacggcataggactccgcggcgccctgatacgcattcggaaggagcgtatttccttcaataacggcatttccgcctgtgacccatatgccccggctgaacgatttcagcacattttgttttacaatgatactgccggccgacatgctgattccgtctgtcacctgattcagagtgttattcgtaaagacggcgttctccgaaagcgtcgcccgcatccccgtgcttcgtctcgtttcggaacgtccgttttcaatgacattgccgtcaacggtcacatcttctgcctgatagacggaaatgcccgtattttcaaattgattaattttgttgtgggtgacgaggacgctttttccccttacatctattccggtggaaaacccggtaatcagattgttggaaatgacggcactgctgctgtcctgtccttgtgacacaccttgtccggcgactgcggtccttgagccgccgtctgaccgaaagaagacattccccgtaatgacggtatgcgccccatacccgtagctgattgtgttatcggaatgatttccttcaattaacacattatatccgttaaaattggtgactgagcttgcggcgtttccggaaaagaagttgttgcggaccgtaatatgaagagcttcttcataatcaatatcgccttctccgtacgattcaatatcgattccgaatttcggagccgttccgttcccttgcccggcgtcttcaatcacgcattcttccaccgtaacggtattgcagccggtgattgaaatgttgttccgccttgactgcctgatctcacagcggcggatggtcacctgttctgaagtttcgtaatcactgtttgtttttaacccgagcgggctgacaattataccgtctcccgtaaaatctgaaatcttcacattttcgatcagcacattgctgctgccttcaatacagattccaaacccccattcatgggtcgaccgcaaagggacattggtatacgtgtgttcatcccgttccccgatgatccggccgccggtgatggtgacattttcacgcctgcctatatagaaagccgagtagccccaggagctgttcggcgccactttaatcgtgcattccggatctaaaacgatggtgagatggctcggcacgttaatcccggcgttccgaaacggctggcttttgtccccgccaagcgtgccgttgattttatacgttccgggcggaaaaaacaccgtatgacagccttcgctgacggctctggccaagcattggttgatggcgcccgtcacatcggtttttccgtctgccgccacaccgcaatccgtaatatccaatatacgattcggcaagtgataatctcctccttcctctcttattgtcatcttattccgccatatcccgctccgcctgtacatactttaaattttattaaaaaagtttataaagatagtttagtcagataatataacaaaataagtcattggaatcaggaaaattcgtctatattcaccgttttaatatcttttcattctggaattttttgaattcagtataaattatattgacacaagtattatataagaatatgatttttgtaatacacttttttaagaaagggttggctcaggtggcatctattgataaggaatctataacagaaactgtgccgcaacgaggctttttcggtcatccccgcggcttgttcacactgttttttaccgaattttgggagcgtttctcctactatggtatgagagccatattgctttactatttatacacggaagtcgctcatggcggtctcggctttgataaaacgaccgcagttgccatcatgtccatatacggatctctcgtatatatgtcgagcgtcatcggcggatggctggccgaccgggtattcggcacggcaaacaccgtattttacggcggaattttaattatgttcgggcacatcgctcttgccttccccggcagcacggcggcgttttttaccagcatggctctgatcattatcggaaccggcctgcttaaaccaaacgtatccagcgttgtcggagatttatatacgaaggaagacgagcgccgcgactcaggtttcagcatcttttacatggggatcaacctcggcggattgcttgcgccgctaattgtcggaacactcggacagaagtacaactaccacttaggcttcggatgcgccgcggccggtatgttcctcggactgattgttttcgctctaacgagaaagaaatacctcggcaaagcaggctccaatgtaccgaatccgatttctaaatcatcagtgatcggcacgggaatcggagtggtcatcgcagcagccgttattattgttctgattcaaaccggctggctgacgatccagcgtgtgattgacaccgtcagtatcctcggcattgtcattccggttatttactttatcgtgatgttcacaagcaaaaaagcgacgaaaacggaaaaatcacggcttgcggcttatgttccgctgtttattgcagcggcaatgttctgggcgattcaggagcagggcgcgacgattctagctttatatgcggatcagcgcacgagactttcctttgcgggcatgcatcttgagtcttcatggttccagtctctgaacccattattcatcgttattttcgcgccggtgttcgcgtggatctggatgaagctcggcaaacgccagccttcaacaccgattaaattcgcgatcggcattatccttgccggattatcatttttagtcatggtgcttccggttatgggcggaagcggcgagcttgtgagcccgctttggcttgtgctcagcttccttttggttgtgcttggtgagctttgcctttcaccggtcggtttatccgtcacaacgaaacttgcgcctgcagctttctcagcgcagacgatgagtatgtggtttttaacaaacgcctgcggtcaagccctgaacgcaaaagtagtcggtttgtttgataagatttctgaagcggcctacttcggctcaatcggtcttgtttcgatcattctcggtattattttaattcttctgtctcccgtcattaaacgggcgatgaaaggcgtacaataaaagagaagcctgcggaatcgtccgcaggctttttttgtgcgtctatcgttttaactcctcaagtgtttctctccatctcttcaggacatcttccggttcgtggagctggatggccggtcctgatgtcagatccgcgtatttcgcccgatcttccttgacggtgatcacgcggcagctgaaccgttcccgctcgtgtttcgcctctttcaacggcggaagcgccttacattccaatgtgacgtaatatgcggctcctccgtgccaggcgatgaaaagagcttgtcccgaatgcagcaggctttttacggtcgtcgtgtttttccataaggcgagccggagatttgttctgctcacggccgcgatttcaccggcgctgatcatggccgcgtgcggacggccttcttttgtcacggattggagcacaaatgcgtcgtgctgctttttttcaagttccgttccgtctaaaagcgcgtaaagcgcctccggcaagtgctccgtcagcattacgcttttctttccgggacagcgggaacatgtgtggccgtctctgtttctttcggatcgattttaaatgccgggttgaatgccgccggattcgtgatactttccggttcacaggatctccatgtgaaaaagcaggtttggcattggtatatttcccaagcgcctttgaccggcgattggctgacggtttctcctttttgcgattcacatcgcgggcatgttttcatagtaaactcatcctttcttattgattcattaagtccatcagtttttgttcccactctttcgttgtcagcggggaatcaagcggctgcgaataatggcctcttgtttccggcgcgacaggcgtcgtggcgtcaagaatcattttgtgtgtcatccctgccggatcagaccccgggtcaagcggaaggacggacagatcaggaatgatgactgcatcgtgtttcggatgcattttcgttgagagcgcccacatgacttgcggcaggttaaacggatcgacatcctcatccacgacaatgaccattttgcagtagccgagtccgtgcggcgtcgtcagggcgcgcatgccgacggccttggcaaatccgccgtagcgcgttttcgtggagataatggcgatcagcccgtgcgtatacatcgcattcacggcgacgatttcgttcggataggcttccttcagctgctggtaaagcggcacgcacgtattaatgccgatcatataatcgcactccgtccacggcatgcctaagtataaatgttcaaaaatcggattgtttctatgatatacccgtttgattttgatcaccggcatgctgcggccgcctgaataatggcccgtgaactcaccgaaaggtccttcgtattcccgttctcccgcaaggatctctccttccagaacgacttcagcaccccaagggatgtctaaatcagacaatttagatttaacgattctgtagggctccccttgaatcgcgccggccatttcatactcggattgatcgtataacagcggagttgatgcagccgtcgtaatcaccggctcacagccgagcgcgatcgtaacgggaagattcacgccgcgttcttcagcttggcgaagatgaatcgcaatatcatgctgaggcacgggctgaatgccgaggcggtctttcccctttacctgcattctgtaaatgccgacattctgcttgccgaaattgtccggatcttcaagatcgcgggaaatgacgcacgctttatccaaatagtagccgccgtccccctggttgattctgaatagcggaaggatgtcaaatagattgatatcttccgttatttcattttcatgaaacggcgcggtttcttcccgtttgaccggcaccggaaatgcatcgtaccgtttggcaaactcaaagaattgttctttaacaggcgtatctttcggcatgccgagcatcatcgcgtgattcggccacgagccgatgacattcagagccacctgcgcatcgtgatgtccgtaaatattgttaaacaaaagcgcaggggttttatccccgagattgctggctgcacgcgcggcggcgcccaggtccggctccggttttacctcttcgttgacggttaagagctgcccttctttttcaagagcggcgagaaattccctaaaatcctgataggccattatcagattcctcctttttgtttttcaattccgtaccaccgtttcgcttccggcagacggatgccgaactgatcgagcgtccggaacacaatatggtctatcaattcatccatgtcagccggcttgttatagaatgccggcatcggcggaagaatgacggaacccatttttgtaagcgctagcatattttctaaatggatttggctgagcggcgtttctcttgtcagcagcacaagttttttccgctccttcaggatgacgtcagccgcccttgtcagcagattgtcagccattccggtgcggatgcttgccagtgatttcatgctgcacggagcgatgatcatcccgtccgtttcaaacgaaccgcttgaaatcgccgctgcctggtctttgtgagaatacgtataggatgcgagtttctcgacatcttttaacgtataatcggtttcatgtgtaatggtgacatttgcccaaggagacacgacaagatgggtttcgatctccgcggcttttaaatattctaaaagcctgatcccgaatatggctcccgttgccccggtcattccgatgacgagcttcatattgacccctcctttacgcttgaaatgtggtgtcaaatccatcatactcctgatatatccatatgaaaaatattcgttaaatctatgtatcataccttaaaggtataaaagaaaggagcgagcgttctcatggatattcggcaattgcgttatttcatcaccattgcccaagagcagaaaatcacgacggccgccaaaaagctccatatggcacagccgcctttgagccgacagttgaaacagctcgaagaagaattgggcgtcattctgtttgaccgcaataaaaagaaacaaatgaccctcacatatgaaggaaacgtctttttgaaaagagcgaaagagattcttcataagtttgaggacgctataatcgaggtacaagagctgaaggaggaggtggccgggacacttgccgtcgggtcaaccatttactgcgcagcgctcatgcttgagaaagtgtcacagatgaaagagcggtttccgcatctcacctttaacatttgggaagatgaacccgtctcactgctggagcttctggaaacccggcagattgacgccgccgtcaccaccaccttgattaaaaacgacggcattgaatcgaaggagcttgaagacattccgtgtgtattggtgctgtccgagcattcaaaacgactgtgcggagaaacgattaaactgaatgacatcgcctctttgcctctgatccttttgcgcaccgtcaatggaagaggtgtgtatgaccaagtcctccaagtttgtgaacagtacggtctcgacctccaggttgtttgtgaatgccatgactccgcgacgctcttgagccttgtatcatcaggattcggcgccacaattctgcctttgacgatgattcccgtccatatgcgctcgcatgtcaaaacggttatcatcgaagacaacccgtttgtcatgacaccggccgtcatctggagaaaagacagctacctgccgaagcctgtcagacagtttttggaattattttgatccggaacacgatgaattcccgcttatgaaaaccaattacttgactcatactaaaaaaaagttatcctttacaattgggagctattttttctcaataaaactactcagaaaagtggggaataaagaagatgaaaaaagcattattcgctttgttcatgatggtcagcatcgcaatgcttgcagcctgcggaaactcacaggacagcggatctaagtcaaaagacggcgatctttgggcttctgtcaagaaaaaaggcgtactgaccgtcggtacagaaggaacgtacgaaccgtttaccttccatgataaaaagactgacaaactgaccggatatgatgttgaagtgattcaagaagtcgcgaaacgcctcggtctgaaagctgactttaaagaaacacaatgggacagcatgtttgccggtttaaacgcgaaacggtttgacgtcgtcgccaaccaagtcggcaaaacaggccgtgagaaccaatatgatttttctgataaatacacaacgtcaaatgcagtcgtcgtgacgaaaaaagacagcacgattgcgaaagaggctgatgtcaaaggaaaaacagcggctcagtcattaacaagcaattacaataaattagcgaaagaagccggcgcgaaaattgaaggcgttgaaggcatggcgcaatcccttcagctcattcagcagggccgcgctgatctgacttacaacgataagcttgccgtactgaactacttaaaaacgtccggcaataaaaacgtgaaaatcgcgtttgaagcaggccagccgcagcagacatatttcgcattccgaaaaggaagcggcgaacttgtgactcacgtcaacaaagcgttaaaagaaatgaaagaggacgggactctttctaaaatagcgaaaaaatggttcggcgaagatgtttctaagtaacatgccggaacccgtgattgcaacagccattccgtgggatttggtgcagcagtcattctggccgattctttccgggggaatctattactcgattccccttaccattctttcctttattttcggaatgatcatcgcgctgattacggcgctcgccagaatgtcaaatatgaaaccattgagatgggtgttcagcgtatacgtatcagcggtgcgcggcactcctcttctcgttcaattgttcatcattttttatctgttcccgacatttaatattacgctggaccctttcccaagcgcagtcatcgcgttttcattaaacgtgggcgcctatgcttctgaaatcatccgggcatctatttcatccgtgccgaaagggcaatgggaagccggttatacgatcggcatgacctatcgcaagacattgttccgcgtgatcctgccgcaggcgtttcgcgtgtccattccgccattatcaaatacatttatcagcctgatcaaggatacatctctcgcgtcacagattctcgtcgcggagctgttcagaaaagcgcaggaaatcggcgcgcaaaaccttgatcaaatcttggtcatctatattgaagccgcctttatttattggatcatctgcttcttgctgtcaatcgtacagcatgtgatcgaacggcgtctcgaccgttatgtggccaaataaggaggtttcgatatgctttccgtcaaaggattaaataaatcattcggacagaatgaaattttaaaaaagatagatatggagatagaaaaagggaaagtcatcgccattctgggaccgtccggttcaggaaaaacgacgcttctgcgctgtctgaacgcgcttgagatccccaatcgcggcgagctggcattctccgatttttcaatagatttctccaaaaaagtgaagcaggctgatattctccgcctccgccgcaaatcaggcatggtctttcaggcgtatcatctgtttcctcaccgcacggcgcttgaaaacgtcatggaaggacccgttcaagtgcaaaagcgcgacaaggagcaagtcagaaaagaagcgatagagcttctggaaaaagtcggactgaaagacaaaatggatttatatccgttccagctttccggcggtcagcagcagcgggtcggcatcgcccgcgcgcttgcgattcagcccgagctgatgctgtttgacgaaccgacgtcagcacttgatccggagctggtcggcgaggtgctcaaagtgattaaggatctggcgaacgaaggctggacgatggtcgtcgtcacccatgaaatcaaattcgcgcaggaagtggccgatgaagtcatcttcattgacggcggcgtcattgtggaacaaggaccgccggcccagattttttccgcgccgaaagaagaacgcacgcagcggtttttaaatcgtatactgaatcctttgtaggagccggagaagaagcgaaacactgatttcgcttcttctttttttgggcggttatgctacaatgacaattaatgaatgttatgaaagaagggacctctttgaagcgggaattcttgatgcgctggacgttttattttgccggtctgttgattttgtctttcggggtatcgttaaccattaaaggaaaagctctcggcatcagcccttgggatgcctttcattatgggctttttcagcatttcgggctatctgtcggccaatggtccatcttggtcggcgcggtcatcgtggctttaacctgcctgttcacgaggacgctcccgaaaatcggcgctatcttaaacatggtgctgatgggaatgtttattgatttcttctcgtttctgcttcctgaggcgcacgctttttccttagcggccgtgtttttttctatcggattgctgctgatcggctgcggcgtcggtatttacgtatcagcagggctcggcgcgggcccccgggactctctgatgatgctgatatctgaaaaaacgggctggaacgtgcaatgggtgcggaacggcattgagctgacgattcttgccgcagcctgggtgatgggcggaccgatcggcgccggaaccattattacggctgttttgacggggctgattctgcgtttttctttgccgcagtcctctaaactgttaacatacgcgatctccgggcgggcaacgtccgttcattaaaaacaaagccgaaacggttttgtttttttattttcggacagctttcgtctgatatggtaggatggttttgacaatattttcagacggaggatctggacatgaagatttacggagtatatatggaccgcccgctttctgcaggggaagaggatcggatgatggcggccgtgtccgccgaaaagcgggaaaaatgccggcgcttttaccataaggaggatgctcaccgcaccttgatcggcgacatgctgatccgcaccgctgcggcgaaggcttacggacttgatccggccgcgatttcattcagcgtccaggaatacggaaagccgtacatccccgcgcttccggacatgcactttaacatttcccactccgggcgctggatcgtgtgtgccgttgattcaaaaccgatcggcattgatattgaaaaaatgaagcccggcacgattgatatcgccaaacgttttttttcgccgacggaatacagtgatctgcaagcgaaacaccccgatcagcagaccgattatttttacctcctgtggtcgatgaaagaaagctttatcaagcaggccggaaaagggctttcccttccgcttgattcattcagcgtccgcctcaaagacgacggccatgtgtccattgagctcccggacggacatgaaccttgtttcatccgcacatatgatgcggacgaggaatataagctggccgtttgtgcggcgcatcccgatttttgtgacgggattgagatgaaaacgtatgaagagctgatgtaagcatagaaaaaggagggtatccccctcctttttttgtcagcctgatatttccgcctgtttctgcagctgctttgcttcttgataaatttcttcgaacagatccgcgatgtattcttcttcaacacatgaaaatgcgattcgcaaatcggtttcattaatggatatcgtcccgattcctctcttttcaagcaacgacactcttaattcgccggcgtttatgtctttcagccggacacacatgaaataacccgagttaaacggataaggcgtccatacgtcttcatagtgcttgttttctgcaagaacggctttcactttgtcagcccgttttttcatgatattatatttcagcgatttttctttctcgtattccggtgactgcatcgcccgcagcataaacgtttgggacggatgcggggcgcttgaaatcgttcccctgataatcccttttgttttttcctcgagcacgcgcagcgctttttcgctttttgtgctgtacgtaataaaaccgacgcggaagccccacgcgtaattttccttcgtcgcgccgtctatttttacgcaaagcacccggtcgtgcacttgggcgagtttgctgaagatggattcctgaatggccgtttcatcgtaaaacagattgtaatacgcatcgtctacgagcacgacaatctctttgccggcctccgctgcctccaggatcacactgacgatttctgacgcttcctcttcccccggcgtatagcctgtcggattattcgggaaattcagcacgacaatcgccttttcttcctgctttttcagcagctcggacagccccgccgcattaaaacgcccatcctgctgaaaaagcgggtacgtctcaatggatgccttgcgccggacaccgaaaatgaaattgtaatttccccaatatttatccggcagaagcagcgcatccccttcattgacgaacaagtcggcggcaatgctcagcccgtgtgttaaagcgtttgtcacgatcggcgtgctgatgtctttgccggctaatgaaggattttcgagacgcatttttttcagccattcctgtctgagcggctcttttccctgcggcggagcataatcgtagatatcatcggggttataggcggacagtgtctcttgaatatgggaaaagtgcatggactcgccttgtgaggtggcaatcccgatcgtggcattatactttccggccttggctttcgcttccgccgattgtgtcagcacccctttcggataaaacaactctctgcccaaatcagaaagcatatgaagcacgtgcgggttttcttcagataatgttctgttcagctcttttgctgcatcattcatgtacgacaatcccttcaaaattatattccatcaaatcataacataaaatttttgataaatgagaaaactcacgggcagattttgttacaaaaaacagacagcgaatgctgtctgtcatatcctataacaattggcctgcagtgctcctgttaataatctcatatattcgttccgccactttttcagtttcacttaatatgaacatgtggccgtccgaaaactcatgaaatacgggattgtcggcccattttttccatccgtccgcatctttgatacattttttatctttccgcccgttaaaaatatggacgggtgattgaatcatgtgagaatcagacggacggaagctttcaagcgcgcggtagtcggacctgaaagaaggcaggaaaaatgacatgacctccttattctccactaactcctgcggcattccgcccagctcgataatatgggcgagaaatttttcatcatcaagatgagacacttttttcctttcaacatgcggcggctgaatggctgagatgatcacggcctgcgggtaaatcccctcccgctcaagcttttgcgccagcctgaaagcgaccatgcctcccatactgtggccgaacaggacaaacgggcggtcaggatggagattcaactcctgcttgtataaactgacaagctgttcaaaatcctcaacggcggacatttgatttgttccgtgtcccggcggttccgcggcaagcatctcacactcaccttgaagataggtgtggagcgggcggaatgatgcggaatagcctcctgcgaacggaaaacagataagctgcgttttttccgtggtatcgaacgatttaaagagctggaccattggcgggcttcctccttttctatcgtgaagctgtcagcttcggatgttccttccttaggaattcgagcaaatatgccgcattcctttcgagacattctccctgaagcatttctgcgtgactgccgcagccttttttcacacggtattcacctgtcgtggcttcctcccacgaagcgagccacggcggcatcgcaaagtccggttctgacgttaatagatctatatccgcattgaccgtgccggtgctgacggtatgcacgaaataagaataaaacgcgtttgtttttttggcgagaccttctttgacggcttcgtcattcagcgcttcgttatcccggtttaccttcatcagcgcctggacatcgctttctacggtgcggccttccaagtcgctgacgccttgttttttataggaatcaaccatgatcagccgctccactttacgtccttcggcttcaagccgtttggccgtttcaaaggcgagcgtgcagcctgccgagtatccgaacagcttgaccggtccttccggctggagctgattgatcagctctgtgtagcgttcgatgcggttgtcttcctcgataaaatcaaacgcacagattctatagccggacagctgttttgccagcggctggtacatcagcccgtaaccgagaaccggcgggaacgcaaacagtgtgtcagactgatttttattcatgatggtgagatctttcattcctttttcttcaccgtgaagcagataaccggcaatgtctgcgattgtcgtcgcttcgaataacagctgcaccgggatgtccgtaccgagctcttttttaatgcgcgacgctgccgtcatcgcttttaaggaatggcctccgagcgcgaagaaatcatcatgaatcccgatctgctgtctgccgagaatctcggaccagatgtgtgcaatcgtttcttccgtcgcgtttcgaggcccgatccattctttcgccgcctgagcctgatccggtttcggcagctgccgtttattgaccttcccgtttgtcgttaaaggaagctcttctaagaaagtaaaggtttgcggcaccatgtaagcaggaagctgttttttcaagtgcctctttacgtcttcagctgaaagcggcgtccggttcacgagataggcgttgattgatgcatctccggactcatggcggtctgcaacaacgaccgcatctttcacacccgggtattcctgcagctgcttttcgatttcttcaagttcaatccggtgaccgcgtattttgacctggtcgtcaatacgcccggcgtattcaatcgttccatccggcagccagcgtgctaaatcccctgtgcggtaaagcgtttctcccggcttgaacggatttgggataaacgtttgcttcgtcaggtcgtgacggttcagatacccttttgatacacccattccgctgatgcacagttcaccgacagctccgaacggctgaagctggttttgcccgttaagaatataaatacttgcattgctgatcggctttccgatcggcaatgaggaaatggaatccggtatatcatgcacgacgtgagctgtcgcaaacaccgttccctcagtcggcccgtaacaattaatcagcttgccaggccccatgatctcaagcgcctttctgacgtgaggcacagacgcgcgctcacccccgaataacacacagcggagccccttcagccactcctctcccgcatcggtgagaagattaaaaagtgcggttgtcgcaaacatgacattgacattctcctgccggatcagatcagtgagccgttctgtatcaagcagtgtatgttcatctgcgataatgagccgtgccgcattcaggattgatgcgtagaaatcaaaagtaaatgcgtcaaaggcgtaattcgaaacagataagaacgtatcttgttcagaaaatgccatatagtctacatgcttgaccaatccttgtatattggcatgagtggtgatattgcccttcggctttccggttgtgccggacgtatacataatatacgccggatcatcgggatcaattgcggctgcaggatcgcttgcctgttcctcaaaccgtgcttgatcatcgatgatgagtgttgttcctgtatacggcagctgagccgctttttctttcatctcctgatgtgtcagcagacaggcagccgcactgtcagtcagcatatacgagattcggtcctccggcagcttcggatcaaccggcagataagccgctcccgcttttaatacgccgagaatgccgatcaccagttcaagcgagcgcttcgtgtacaacgcgacaacggtgtctttacccgcaccttgcttttgcaaacggcgcgcaagacggttcgcttcctcatctaattcgcgataggaaagagtctggccggaatacgtaagcgccggtgcatcaggatttacattcaccgcttccttgaaccaatccgtcagaggcttcgcctgatgagtctcagccggcgggtttaagccggtaagcagaagctctctttccttttcatcaacaagtctgatcgtattgacagggtgatccggcttctggatgagctgctgaatcgctgtgagaagctgagattttaagcgcaggataaacgcctcatcaaacacattcccgttataggcaagcttaatcagcatctcatcacctggagaagccatcaggttgagatcataattcgatttctcaaaaacatggacgtcctccatatcaaagccgttttcactgttctcttcattttttgcatcctgaagcggataattttcaaacacaataatatgatcaatcagctttggctgatcggcctggctttggatgtcatagagcggcacatattgatgaggctcagactgcagcgattgctcctgcagctgcttgagcaagccgttaaatgtggtatcctcagacagcttcacccgcctcggaacagcattgataaacagcccgaccatatgttcaacgcctttgatttctgcgggacgcccggaaacgactgtgccgaagatcaaatcgccggactgctggtagcggctgattaatacactccaaaccgcctgcagcgccgtactcaaagtggtatgctgcgattttgcaagctcggtaaatgcttttgtttccgcctccggcagtgagaagagcagctctttcggctcatagccgttctcttgtttctttctttgctccgcaaatgtcgtttgtccttcaaaatcttctaagtacccgcgccagtaatgcagtgatgcatgtttatcctgcttttcaagccacttgatatagtctttatacggtttgaccggcggcaggctgtacggcttttgttctcgcagggcattgtataccttaaacagatcctgcacgacgatgccgaagcaccagccgtccaaaatgatgtggtggtagctccacacccattcaaagctttcttccgattttttaaagatggctgcccgcatcggaatatcccgcgtcaaatcaaagcccttgatcttatcctgttctttgtattcattaattttggatgcttgctcgctgcccgttaagtgtgtcagatcgatttcttctatctgaaactgccgttttttcaatacgacttggaccggcctttttactttttcgtgaatgaacacggtacgaaatacatcgtaccggtccatgatcacattcatgctttcttcaaggcatttgatattcaagctgccttttactttcattgtcatttgttcgatgtaaaagctttggccgggattcaggagagtatgaaacagcattccctcctgcatcggcgacaaataatacatgtcctgaacttgatcttttttgaactggctcatctgctccgctccccccttctgttaactgtttttgtcacgttaaattctcctcaagcatgtcaaagatgtctcccatttcatccatctcaagatcctgcgcgctgaaatcgctcggcgtaaattctttctcctctttggccgtgcaatggcggatgatcattaaaagattgtctttaaaccgctgcatctgtgtttcgacggtgcttctttcatattcttcctgattgtatgagcaggaaatgacgaagcggccgcctgtaaccatcccgctgaagctcagtgcgtataacgcctctgactcttcgctgacttgacgtcccatatcatatggagacggctcaaaccattccgttttcacttcattgtcaaactgccccaagtagttaaaactgatttcaggcgcggcgcctttttctgtttcatcggatgacagataccggagaattccgtatcctacacctttatctggaacgcgccgcactgtctcttttaccgttttaatgacggaagagacgccgtcttccttgctgatctgcagaatcaacggatattgggccgtaaaccagccgaccgtccgtgaaatattgacgttcggtatgatttcttcccggccgtgtccttctaagttgatgccgactttgccgttttccgtccattcaccgatcgttaagccgagtgcgctgagcagaatgtcgttgatttccgttccgtacggatgatgaacatctgtcagcagctgtgccgtttcttcctcagtcaattcacatttcacggccgccgtatgtttgacgagccgtttgtccggatcatggtctttcggcagcggccggagctcttccgcatctgcctgcgcccaataatccgcctgctttttcagctcttctgattgcgcaaacgtgttcagcgcctccgcccaatctttaaaggagtgggttttttgcgggaggacgatgctgttttgctgctgcgcctgtttataacctgaagcgaaatcctccagcagaattctccatgaaaccccgtccacgacgagatggtgaaccgcgattaacagatgatcgccttgttctgtccggtattgctccgcttttaacagcgggccgttctccagatcaagactgccctgaagatgatcggcaagccgctgaatctggcttttcagcatatcctcgtccgttccgtacagatcaacgatttcaaagcttgccttgcattctgtgacagggaggtatgtctgaatgatgccttccctttcttcacggtaaaccatgcggagcgcatcatggtgttcaatcaatgcttgcagggttttttccaccaggtccggatcaaagccgtctttcgcgtgaagcatgacggattggttccagtggtgtttgtccgtgaagtttttctcaaagaaccagcgctggatcggcgttaactccgcttcgccttcgacaggtccctggtcggcctgcttgccttccgtccgctccacataagagacgagctcttcgatggtcgggtgctggaagagatctttcatctccagcttgtagccgtgctggttcaggcggctcgccatttggatgcctttgatcgagtcgccgccgagggtgaagaaattatcgcttacgccgatctgatcaagaccgagcacttcctgccaaatgtcggaaagcagcgtctccatctccgtttccggcgctttgtaagcggcgcttcccgcttcaatgtccggttccggcagggcttttttgtcaatctttccgtttgcggtgaccggaagctcgtccatctccacccagaacgccggcaccatgtagtcaggcagcgtgtctttcagcgcggctttgagcgcttcaatatcgtcctgccgaggcgcgacataggcgcaaagcgcggtattgcccgctttgtcttccaccgccgtcaccgctgcgtcatgaacgtccgcaagctgggcgaggcggacttcgatttctgaaagctcgatccggtagccccgcactttgacctgctggtcgatacggccgatgtattcgatgccgctctgcgcgttccatttgacgaggtcgccggtccggtacatgcgctcgccgggcacgaacggatctgcggtaaaccgcttcgccgtttcttcctcacggttcaggtatccgcgtgccagaccgcggccggccacgcacaattcaccggcaatgccttccggctgcacctgatcgccgtcgccgagaatataagctctcgtattggcaatcgcccgtccgatcgaaagcgatccttcctcaggattgatgacgccgcttgtcgcgacgacggtgttttccgtcgggccgtagttgttgacgatcgtgtacggctgtttcaccgcccgcttcagcttgtcgccgccgacgagaagcatgcggagagaggtattttccagctccataaattgttcggccagctgcgtcggcaggaaggtgatggtcacgccgtgctcctcgaaatagtgatttaagcgggtgatatccagccggatcgcttcgtcaatgacgtgaagctccgcgccgatggtccatgtcgggaacatctcccagatggaggcgtcaaaaccgaagcccgcgtatttggcgcttttatcatccgccgtcatggcgaatgcgtcgtgatgccagaagcacaggttcaccagcgcatggtgttcgaccatgacacccttcggctgtccggtcgttcctgacgtgtaaatcatataagcgagatgatccgccgttgtttcagtctgcgggttcgcttcatcgttttcatcaagcggcaggctcagaatggagcgtccgccgtcaagcaggatcgtttctcctgtgtagccatccggcacgtccagcgcttcctgtgtgagaagaagcttggcgccgctgtcctgcagaatgtagctgatccgctcttgtgggtagtcggggtcaatcggcacaaatgccgcgcccgctttcaggacgccgagtacgcccgcggccatttccaaggacggtttcgtcaaaatgccgacacgttcgtcagccgtgacgccgcagtctatgagaatgcgcgcgatccggttcgcccttgcgttcagctcgccgtacgtccatttcgcgccgttatatgccgcggccggccggttcgcgtatcgggcggccgtttcttcaaagagacggtgaaccgttttgtcctgcggcacagagagtgtttttcctttccatgcgtcaaggagggcttgtttttcagcatcgctgatcagtgaaatctcaggcagctttctgtccgggctttccgccgcttgcttcagaatccgcaggaacccggcgctccacttttcaatggtttcttttttaaacagatcagtcgcatattcaaactgaaggccgagaccttcttgatccgtaaagccgccgagtgtcagatcgaatttcgccgtgccttggtttgactcatacggagtgatgcgcaggttctccagttccagtgtttctttatccggatcttctgtcgtcaccatcacctggaacagcgggttgcggctcatatctctcggcaggtcaagctttccgatcagatcctcaaacggataatcctgatgcgccagcgcgtcgagattggtttgtttcacccgttcgagcagcccggcgaaggtctgctctttttgcgtttcattgcgaagcgcaagcgtattgacaaacatccccggcatttcctgaacttcggcgctcgttcttcccgcggtcaccgaaccgataatgatatcgcgctgtcccgtgattttgctcaaaaagacatggaacgcggcgtgaagcaccatatgaagagtcgctcccgatgattccattaattcacgcaccgctttttccgtctcacgccccgctctgaaacggacggattgtcctttaaaactttgaaccggcggacgcggaaaatcggtcggcagattcaattcaggaagctcgccggaaaatgccgagagccaataacgctcatggtctttcatccgttcggcctgcccgggttcattctgccagacggcgaagtctttatagtgcaggttcggcgacggcagacttccgcctttgtaaaggtgagcgagctctttgaccagcatgcttctggacacgccgtcggcaatgatatgatgcatatccagcagcagcaggtgtttcttttcattcagtctgacaagagcggcccgaatgagcggagccgcgctcagatcaaacggcttaatgaatgcctgaatgataagatccgccttctcctcgtccgctgcttcaaaaatgtgcaggtcaatgtcagcctgttctgcgatctgctgcatcggctggcctttttgatcgataaaggacgtccgcaaagattcgtggcggttgatcatctgattgagcgctttctgaagccttgaaatattgacttctccttccatcagaagaacggacggcatattatagctgattgtctcccggtcaagctggttcagaacgtacatccgtttttgggcggatgataacgggtacgcgtctgcactgtctgccggtgtgatcatccgatatccctcagataccgccgatttttcgatatatgcggcaagcaggcggacagtcggctgttcgaacagcgcttttaacggaaccgttttgtccagttcagcctgaatattggcgaggagcatcattccttttaaagagtgcccgccgtaatcgaagaaattatcgtcgatgccgagcgtatccgtaccgagtgtctgtttccaaatgcggcacagcttttcctccaattccgtttccggcaaggctgaagcaatttgcgccgtttggctgacgcccggtttcgggagggcgtttttatcggtttttccgttggctgtgagcggaatgcggtctacttgcacgaaataggccggaagcatatgagacggcagtgtttcggaaagccgtttgcgaagctcagagcctttcagcccgctgtcggctttatagtacgcgcacagttccggcagcccgccttcgctgactgcgagaacgaccgcctcctgaatgccgtttacgcttaacagcacggtttcaacctcttttaattcaatgcggtagccccggattttcacctgatcatccgcacggccgataaattcaatcgtcccgtcaggaagcctgcggacgatatctcccgttttgtacatcaggctgtccggtgaaaaaggttttgagagaaatttctccgccgtcagctgcggacggtgaagatatcctctggcaagccccttcccggtaatataaagctcgccgcttgcgcccggaggaacgagctgcattgctccgtccaatacaagcgcgccggtatttgcgatcgggcggccgatgacgggacgctgctcatattgatcaagacgctccatattgatccgttccgcaatggcgccgatcgtcgtttccgtcggcccgtagtgattgatgaagtcggtatgggcgtatacgtcatgaaacttgcggacatcggacgtgatgatcttttctccgccgagcaccactaaacgaagcgagctgaaacggcgttctgacgtaaaacgggctgtattgacgatcatatggaacaatgacggcgtcagtttcatatacgtaatgccgtttttctgtatatactcaccaagctgatcaggcgcggtgtacgtctctttcggcacaatgtgcagctcgccgcccgcctgaagaatcgggaatatggccgtatagccgagatcaaatgcgtaagaagacagcagcacggatttgtcagcttcggtcaaaccggcttcacggctgaaccatgtgacataattgattagattgcggtgttccagctggacgcctttcggtttgcccgttgttcccgaggtataaatgatataggcaagccggtcggcgccggactccgtttcaagccggtcggcgctttcgttctgccattctccgtcttccattacgaccgtttttcctttataaacggcggccgcggtcatgtttctctcattgacgaccagaagcttcgttccgctgtcttcgagagagtagcggattctctcttcaggagtctccggatcaatcgggagaaatgccgctccggctttcatgacgccgagaatcgcggtaatcaagtcggccgaacgatccatcataatggccacgatgtcctcactgcccgttccgcaagcctgaaggtgtcgggcaaaccggttcgagcgttcatcaagctcacgatatgtcagacttgttccgcccgcaaccgccgtgagatcaggcgttttctgcgcttgccgttcaaacagcgaaacaaaagtgccctcaggcagatccgcttccgtccgtttttcatcagaaaggagcgcttcccgctcaggagcggacagcaggcttgcgtcggccagctgaatatccggattttcggcgcaggctttaatcagattgacaaaatgagcgctccagcggcggatggtttcgtccgcaaataaggctttcgcgtaatcaaagctcaatccgacctcttctccgcgctcagccgcttctaaggaaagatcaaatttagcgacatgatgatgcatggagtaagaagaaatctccaaatctccgagccgcagggccgggatctccatgttctgcatattaaataacacgctgaacagcggactccggcttgtgtccctcgttaacggcagtttttcaattaattcttcaagcggatagctttgatgctcaaaagcttgaaggctcgccgttttcacttcatccagaaattgcttgaacgtttttttgccggcaggatgcgaccgaagcgcaactgtgttgacaaacatgcccggcacgtcttggagatcaggatgctgtcttccggccgccggagacccgactatgatgtcttcctgccccgaatatttggacagcagcacttgaaaagcggctaacaagaacatgtacatcgtcgtatccgtatcagccagcagcttcttaatctgcgccgtcacctgtttatcaagcccgaagatgacgcgttccccttcaaaactgcgctcggcaggacgcgggaaatcaagcggcagatccagcaccggcagatcgcctttgaacgtatcaagccagtaagcttcgtgctgatcaagatttgctttttcacgctgccagactgaaaaatccttataatgaatctttggcagctcaagctccgtgccttgataaagcttcgcaagatcaccgatgaaaatgcccattgagcttccgtccgtaataatgtggtgcatgtcaatcagcagaagatgccggtcttctttaagccggatcagcttcgaacggaccagcggcgcacgattgagcgcaaacggcctgataaaggcttttgtcagctcttctgcatcttcttcccggccctcggcggtttcaagctcaaacgacacatttttatgaatggtctgcacgacttctccatctgccatgtcaaacgacgtacgcagtgtctcatgacggttgattaatgcctgcatggcctcttcaagacggtttttgtctactgatccttccagcagaagtacagcagggacgttgtagctcgtgctggcctgtccgagctgattaaggatatacatcctgcgctgtgctgaggaaacaggataatgcttctgataaggcgcttgtcggatcggttcaaactgctgttcctcctcggtctcatgctccaaataatgcgcaagctcctgaatggtcggcttttcaaataacactttaatcggcacttctttttgaaagtgctcctggattttagcggtcatcatcatggcttttaaagaatgtccgccaatcgtgaagaaattgtcagtcacacccgcttttacaccgagaatgccttcccaaatgtccgcgagtttctgctccgcttccgttttcggcgcttcgtattctttttgaacggcttcagcctgaggctcaggcagcgcttttttatcaatctttccgttcgccgtcagcggaaactgattcatctggatgaagtgcgcgggaatcatgtattccggaagtgattccgaaagcgttttgcgcaggtcttccggcgaaagggcttggtctgcggtaaagtaagcgcagatttcattttcatccgctttatttttccggatcacagccgcagattccgtcacattctccgcctggctgattttcgcctcaatttcgccgagctcgattctgaaaccgcggacctttacttggttgtcaattctgccgagaaactcgatcgtgccgtccggaagccacttcgccaagtcccccgtccggtatatcgtttcatccggtctgaacggatcgcggacaaactgcttctccgttaattcaggcagattcacatagcctcttgccactccgcttccgccgacacacagctccccgggcgcgccgatcggctggaggttgcggttttcgtccataatgtacgcagtggaatttccgatcggcttcccgatcgggatcgaaccgtcgtagtcctgatcaatgagaaaactcgtcgaaaacgtcgtattctccgtcggcccgtagccgttccaaagcgacagctccggtgatgccttcctcactttgctgacgatatgcggcacaagcgcatcaccgccgatgatgaggtgccggagcgtgttaaacatgccggcatccttttgggcaagctgattaaacagcggagacgtcagccacatggtcgtgatccgctgctctttcagaaattgggcgaatcgtccggcgtcaagcagcgtctcttttttcaccgggtgcaatgccgctccgttcagcaatgcgccgaagacttcaaaggttccggcatcaaagctgacggctcccgtttgcgccatccggtcttcttcatgaaccggcacgtaattcgaaggtttgacgagcctgatgatatttctgtgttcaatcatgacgcctttcggtttgccggtcgatccggatgtatacatgatatacgccaagtcgttgccgccggccgggagattcaagtctgttccgcttaccgtttcatccgcgctttcattcagcatgacaatcgggacttgcaatgtgcccgcttgttcttgatagtcctgaactgtcagcacgagccgaatcgagctgtctgccgccataaagcggagacggtcctccggaaaagccggatcaatcggcacataggcgccgcctgcttttaggacggcaagcattccgataacggtttccgcagaccggtcgttcataatagcggcggtccggcctttttccagcccgctcttcacaaggtgtctcgccaggcggttggccgcttcgttcacttcacggtaggtccattcgcgtccctcttcttttatcgcgatgcttgcaggcgtccggtttgcctgtgcttcaaacaaacggtgaacggcctcctcttccggaagcgccgttttcgtatcattgaatatctcaacaatctgccgctcttcttcgcctgaaacaaggccgagttcccgcacgggcgcgtcaggcgttccgaccgccgctttcatcatgcaggtcagatggtgcgccgttcgttcgatggcatcatgtgcgaaagccgctccgttgtatttgattttgacggtccacgtttttcccggatacacgatgagattgaaatcaaagctcgtctgctcaaaagcatgttcaactttaatggaaaagccgagtctttcctccatgcccccgttttccagctctttgtccagcggatagttttcaaacgcgaccaaatgattcaagaggctgccgtccagagcggagcgcttttgaatgtcatagagcggcacataatcatagcgctcggcttccacggcgtttttctgaactgccgccatcacgtcagaaaaggctgcatctttgtcaatcttgattctgacaggaatcgtattgatgaacagccccgccatcgtttcaatgccgttgatttctgaaggacggcctgatacgacggtgccgaacaccacatcgtctgtatagttgtatttgctgagcaccgcaccccaaacggcctgaaacaggttaggccccgtgacttgatgccggttggcggtctgctgaatctgcgcgaccagctcttcatcccagacaaaagaatattcttcattttggtagtctttcttttctgatgccagacggcccgggagcaggctcggctgttcgaaatccgccaggcggctgctccaatattgttccgcctcctcataatccctgcctccgagccatttgatatagtcagagtaaggtttgccctggcttcccccggcgggccggccggcacgaagcgcttcatagttttgaaacaggcttttcatcaaaacgcccatactccagccgtccatgacgatatgatgattgctccagacgagatacagttccttctcactgagcctgaacaccgccgctttaaagagaatatccttcgccagatgaaagccctgctgctgcacatcgcgtttatagcgttcaatatattcggtttggcgcgcttcatctaattgactgatatcttcatagtgcaccttcgtcttccgctctgctaatacgacttggcgcggtttttgaagctgctggtgcacgaataccgtacgcaggatgtcatatgtccgaatcagctcattgacacttttttcaaaaagctcaagctgaaagcttccgtgaatcctaagctctaattgtgtgaagtaggaggaagaatgcggatcaagcagcgcatgatacagcattccctcctgcatcggtgtgagtgcatacaccttttgaatcgattttttgctcatatgtcacctctgtcttttctgttagagaatttccattaatttatcaagttcatcaagcgtcagatcatcatcgccaagatcgctaggcgtaagctcaggtccgtcttgggccaggcagtgatctatgattttcaagaggtgccctttaaagctgtcactgaacgattgaatggttttttcatgaaattcgagagaatgataggcaaacgtcatcgtcatctgcccattttctataaatccgacaatatcaagcgcattcggcttctctgtgtcagggctcagcgattgtcctgacggcatcccggatcttgtaaataagccggaatccgacatctcattaaactggcctaagtagttaaagctgatatccggatcaatctcaaatgaaagaccctctttatgctcaggcgccgttacataacgcagaatgccgtagccgactcctttgttcgggatgtgtctgatgtcttctttcatttgtttcagctgatatgaaagatcgtcggcgtgcttcatctcaaggatcatcggatacatgctcgtaaaccatccgaccgtccgggtgatattcaggccgtcaagaatgtcttcgcgcccgtggccttccaaatgaacgccgatcgtgtcttcacccgtccactctttcagcgccagtccgagcgccgtgagcaggatgtcgttcatttccgtatggtaggcttcatgtacgtttgtcgtcagctgttcagtttgttcaggcgtcagagagaaactgaccgttctcgtatgtctcatgcgctgatcgccagactgcctgtctttcggaagctgagtgcatacctctttctcctcaagccccctccagtaatccgcttctttcagaaacgccttcgtatttgcgtattctttgattctctcagcaaattcggcgaatgaatgtgttttcggaggcagcgccggttcattgccttgtttcagctgcgtataaacggacgtgaagtcctccagtaaaatccgccaagatacaccatccacgactaagtgatggattgcgagaagaaggtggtctccatcttcagcccggaagagcccggccttcagcagatgtcctgtttccagtgaaatactgctttgaagacggtctgcttcccgttcgatacggtcctcatgatcttcagcaggtccgttcagctcaaagacgttcagttcaacagacgcatcctcaagccctctgtaatacggtttttgttcacgataaatcatccggagcgcatcatggtgcaccgtcaggacatgtaatgttttttctgttatctccggatcaaagccgtctttcgcatgaagcatgacggattgattccagtggtgtttgtccgtgaagtttttctcaaagaaccagcgctggatcggcgttaactccgcttcgccttcgacaggtccctgatcggcctgcttgccttccgtccgctccacataagagacgagctcttcgatggtcgggtgctggaagagatctttcatttccagcttgtagccgtgctggttcaggcggctcgccatttggatgcctttgatcgagtcgccgccgagggtgaagaaattatcgcttacgccgatctgatcaagaccgagcacttcctcccaaatgtcggaaagcagcgtctccatctccgtttccggcgctttataagcggcgcttcccgcttcaatgtccggttccggcagggcttttttgtcaatctttccgtttgcggtgaccggaagctcgtccatctccacccagaacgccggcaccatgtagtccggaagcgtgtctttcagcgcggctttgagcgcttcaatatcgtcctgccgaggcgcgacataggcgcaaagcgcggtattgcccgctttgtcttccaccgccgtcaccgctgcgtcatgaacgtccgcaagctgggcgaggcggacttcgatttctgaaagctcgatccggtagccccgcactttgacctgctggtcgatacggccgatgtattcgatgccgctctgcgcgttccatttgacgaggtcgccggtccggtacatgcgctcgccgggcacgaacggatctgcggtaaaccgcttcgccgtttcttcctcacggttcaggtatccgcgtgccagaccgcggccggccacgcacaattcaccggcaatgccttccggctgcacctgatcgccgtcgccgagaatataagctctcgtattggcaatcgcccgtccgatcgaaagcgatccttcctcaggattgatgacgccgcttgtcgcgacgacggtgttttccgtcgggccgtagttgttgacgatcgtgtacggctgtttcaccgcccgcttcagcttgtcgccgccgacgagaagcatgcggagagaggtattttccagctccataaattgttcggccagctgcgtcggcaggaaggtgatggtcacgccgtgctcctcgaaatagtgatttaagcgggtgatatccagccggatcgcttcgtcaatgacgtgaagttccgcgccgatggtccatgtcgggaacatctcccagatggaggcgtcaaaaccaaagcccgcgtatttggcgcttttatcatccgccgtcatggcgaatgcgtcgtgatgccagaagcacaggttcaccagcgcatggtgttcgaccatgacacccttcggctgtccggtcgttcctgacgtgtaaatcatataagcgagctgatccgccgttgtttcagtctgcgggttcgcttcatcgttttcatcaagcggcaggctcagaatggagcgtccgccgtcaagcagaatcgtatctcctgtgtagccatccggtacgtccagcgcttcctgtgtgagaagaagcttggcgccgctgtcctgcagaatgtagctgatccgctcttgtgggtagtcggggtcaatcggcacaaatgccgcgcccgctttcaggacgccgagtacgcccgcggccatttccaaggacggtttcgtcaaaatgccgacacgttcgtcagccgtgacgccgcagtctatgagaatgcgcgcgatccggttcgcccttgcgttcagctcgccgtacgtccatttcgcgccgttatatgccgcggccggccggttcgcgtatcgggcggccgtttcttcaaagagacggtgaaccgttttgtcctgcggcacagaaattgtttttcctttccatgcattgaggagggcttgtttttctgtttcattcaccaaggaaagctcagaaagcttcgcagccggattttccgttgcggcttttaacagttgaagccaataatgcttccacgtctctgccgtttccggtttaaacagcgcggtgttatattcaagcacaaacgttaagccttcgtctgtgtcctcagccgtcatcgtcaggtcaaacttggctgtttttctgtcaaacgggtggtgcttcagctcaattccttccatgaccagatcttcagcatttgcattttgcattgagaataccgcatcaaacagcggatttcggctcgtatcacgctgcacctcaaccttttgcagaaggtcttcaagcggataatcctgcgcgtcaaatgcatgtaaagcggtttgtttcacttctttaagatagtccgtgaacgttttgtccgcttccggatacgtacgcagcgcgagtgtattcacaaaaacaccgatgacgtttgcgagatccgcatgtgaccgtcccgcaaccggcgagccgacaatgatgtcatgctgtccgctcagttttgagagaaaggcgctgtacgacgccagcagcaccatgtacatggtagaatccgtttgtttcgcaagactgcgaagagccgacgtctgttcctcagtcagagaaaagaccagcttgtctccttcaaaggtttgcacggccggacggctgtaatcagccggcagcgtcaataccggaagctcgccgtcaagctcccgaagccaatgctcctcctgcttgcggtactgctctgattgaataaatttctgctgccataccgcatagtctttataatgaatccgcagcggctcaagcgtttcgccgccatacaagcgggacagttcatctatcagcacgccgactgaagcgccgtccgaaatgatatggtgcatatcaaacagcagcaggtggtcatgttcagccagcttgaccagccccgttctgacgagaggaagctgatccagacggaacggccggataaagctctgaataatccgttcagcatcttcttcagaggcttcataatattccatgtcgatataagcttccgcccatatacgctgaaccgtttctccatcctttatgtcaaatgtcgttctgaaggcttcatggcgttctgtcagctgtttcatgacggatttcagcttttctgcatcaagctttccttttaaacggagcacagacggcatgttatagcttgtttcagcgccttccagctgctgaagcacgaacatccgcttctgcggtgaagaaaccggatacgtttcccgctccgcagccggtgcgatgctctcagccgccttccgctcagccccttcaatcagctgcgccagcccagcagccgtcggagaagtgaacagatcctttaaggtaagctgcacgccgaatgtcttctggataagggccagcagtttcatccccgctaacgagtggcccccgatctcaaagaactgatcatggacgccgacccgttccatttgcagcacctcagcccaaatatccgccagtttttgttctgtttcattgcgcggcgccgtatatgacacggcattcgctgcggtcacatccggcatcggcagcgcccgcctgtcgatttttccgttccctgtaagaggcagttcatccaattgaataaagacggacggaatcatataagccggaagatccttcgccgtatgctccctcagctcccgggaagatatttccctgaggccgacaaaatacgcgcaaagaagtttgtcacccgcgccctgatccacagcgagcacaatgcattcctgaatctgatcatggctttgaagctgatgctcaatttcgccaagctcaatccgctgaccgcggattttcacctgatggtcgatgcgtccgataaactcgatatcgccattcggaagccatctggccaagtcgcccgttttatacatccgttcaccttccttaaacggatgctttacaaatttttcttccgtcagttcaggacggttgtagtagccttctacgagaccttccccgctgacgcacagctctcccgcgatacccgccggctgaatgcgtccggctgagttcataataaagacttccgtattgctgaccggtttaccgatcggaacggagagcgtatcctcttcaatgacatccaccggatggtatgtcgcaaacaccgtgctttccgacggaccgtacatatgaagcagttttcctttcccgactgccgccagcgcctttttgacatgttctacagacgctctttcgcccccgaacatgattttccgaagcgtcgtcagacaggacggctccatatcaacaagcaggtggaacagggccgtcgtaatcatcagaatgctgacgttctcccgtttgatcacacgggacaggcgcgacatgtccagcaccgtatctttcgggacgatcacaagctttgcaccgtttaacagcgaaccgaacatatcaaacataaaagcgtcaaagacgtagtttgacagaccgagcactgtgtcctcttcagaaacggtcaaatagttcgtgttttttaccgtccgcaaaatgttggcatgtgtgacgatgtttcctttcggcgttcccgtcgtgcctgatgtatacgtgagattggcaatcgttttggaatcaaacggcaatgctggattgcgagagtccttttcatagctcgcctcatcatcagcaagcacaatgacgccttgaaaaccggccttttccgcaagcggcttgaggctttgctgagtcaggagcacattcgccccgctgtcgcggaagaaatgctgaatccgctgaaccggatgctcaggatcaatcggcacataggcggaccccgcttttaacacagccataatggaaacaatcatgtccattgaccgttcacataaaacagccgcggttttcccgccgcctccgaccgaaagaatatgccgcgtaagcctgttggcgcgttcattcagctgctgatacgacagagtttccccttcgaactgaagagccgtccggtcagggttctttcgggcctgttcttcaaagatctgcacgatcgtttgctctttcgggtatgccgtgcgctccggattgaaccgctgtaattggttcaaagcctcccgttcagaaagcagatcatattcgctgattttcgcatccggctgagctgccgcactctccagcagacggacatagtgcgcaagcatgcgatccgcagttgagcgcttaaacagcttcgtgcaataatccaaatcgagcgcaatgccttccgctgtttcccgggcctgcattgtcagatcgaatttagcgatattgaagttggtttcatgaagagacagcgtcaggttgccgatctccggaattccgtccgaagcattttgcagactgaacatcgtgtcaaatatcggatgcctgctcatgtcccggggcacgttcagctcctcggtcagccactcaaacggataatcctgatgggaaaacgcgtccagcacctgtttgcgcacatgacctaacaagccggcaaatgtctgatcctgcttcacggagcttcgcagcgcaagcgtgttgacaaacatcccgataagcccctcggtatcagagtgatttcttcccgctgacggtgttcccacgatgatgtcttcctgtcccgaatacttagaaagcagcgtatagtatgccgataacagcaccatgtaaagggtggctccgtttttctcggcaagcttctgcagccgttcccgcagcattttcggcagcttggcggacacgcggtcaccttcaaagctttgcacctgcggccgcggataatcagggagcagctgaagcaccggcagttcgccgctgaagacttctttccagtacgcccgctccttcttgtagccttctttcgcccgttccgcctgccatacggcataatctttatattgaatgcgcaattcaggcagctgatttccgccgtagatgtcagccagttccttcagcatgatggaaatagacaccccgtcagaaatcaggtgatgcatatcaaacagcagcatatggcgattgtgaccgagcgtttgcaggccgattctgaacagcggcgcctcagataaatcaaaacggcgcacaaagtccttcatgacctgttcattcgttcttccgcgcgcttcgagcatttcaatatgaaacggaacatgttcgtgaaccacctgtctcggcgtgccgtcctccgattgaaacgatgttctgagcgcttcatgcctgctgattaaggcagaaaatgcacgctcgagcttttcaaggtctaaagcgccctcaatcacggccgcagccggcatgttatatccgactcccgcatcttcaaattggctcgcgatataagtccgctgctgagcgagcgaaagcggatagctcgcctgcttctcagccggctcaatcgccctgaatgccggtccttcgtttcggttttccgcataatcggcaagcgccgcaatcgtcggatgctcaaacaagtattgcagcggaatttcaacgcccatttgcttatgaattttcgtcagaagcgtcattgcctttaatgaatgaccgcctgactcgaagaaatgatcataaatgcccgccttgtccattccgaggacttcctgccagatgacggtgagcgtttcctccgtttcgtttctcggcgcggcatattcggatgagctgacagcctgcacatcaagcgcaaacagctttttgcggtccgccttcccgctcggcgtgagcggaatttcgtccgtttttgtaaagtaagcgggcaccatgtaatcaggaaggtgcttggacacatactccctgtactcggcagggtgaaactcggttcctttttcctgaacgatatatgcgcaaacatctaagctgccctgctgatccggccgtgccagcacgacggcctgcgccgcccccggagcttttctgagcaccgtttcaatttctcccagctcaatacggtagccgcggactttcacctgatcatcttcacgtccgatatattcgatcgtcccgtccggcagccagcgcgccatatcacccgtgcggtacatgcggccgcttccgttaaacggatcttgcaaaaacttctctgcggtcaaatccggaagatttaaatagccgcggcctacaccgtcacccgcgatatacagctcaccggccgtgccgtcgggctgaagccgctggtgcttatccaatatatacagacgggcgttgccgagcggttttccgatcggaacgtacgccgcctgttgattcattccgttatcggcggacacctgatgcacggacgcatctacgcacgtttctgtcggcccgtagacattcgtcagacgcggcgccctgcccgattgatgaaagaggttcatcagctgttcagcaacagcggcggacaggccctctcccccaatgagcatgtggcgcaattcaattccgctgacatctcccgccgcaaccatcatctgcagatgcgcaggggttccgtcagtggcttcaattcggttttgacgataatagtccagcagtgccgagccattcgttacagtcgttttcggcacgatataaagcgtctgtcccaaaagaagcgaggcaaaaatctgtttgacggacgcatcaaaatgaaacggagccaaaagcgccattcttaatgtctgctcaccgcattgataaatctcctgctgcagtgattgcaccagatgatgaacttgccggtgctcaatcatcacgcctttcggccgccccgttgtacctgacgtgtagatgatgtaagccagccggtctgattgtgtactgacaccgtccgcagccgtttcaaactgaacagcctcgtcaaaatcaatccgttcggcatccgctgcaggcgcctgtattccggcctctgtcagaacagccttcgctccgctgtcctccaaaatgtactgaatccgatccgccggaaagtcaggatctatcggcacataggcgccgcccgctttcaaaattcccaatattgccgcaataacacgctcagaacggccaagcagcaccgcgacaggagaatcggctgatatcccggctttaagaaggcgtccggcaattcggcctgactgttcatgcaatgtgcgataggacaatgttcggccttcatacaccaccgccggtttgtcagacagtgacttcactttctcttcaaacagccccggtatcgtcatctccccgcggtaattcaccggattaccggaggcccgtgtcagcagccgctctttctcggattcagaaagaagagtaagctcatcaattatgcgatcaggagatgaaatcgcatcttcaatcagcgtgatcaaacgttcagaaacagatacaatctcctctcccttgaatatgtcgctgcgatagtcaaaatcaatcgtcaatttcccagtgtcccatcgttccttcacatgaatcgaaatatcatttgtaccgcttccgctgaaaatagggtctgtcaggaaggacagattctcttttttctgccactgcatcacctggtactccagagccaccgtaaacaatctgctcagcgaacttttcgaagcgcgcaaatcattgacaagcaggttatacggatacttttggtggcggagaattttcatcagatccttcatccggcctttaacgaattccaagaacgactgtcctccgtcaacgcttgtccgcacaggaaccgtagatacgaacatcccgagcatctgcttttctttcgcattcgtccggtttcccataaacgtacccgtgacaacgtcatcccggccggtcactttgtagagataagtgatcaaagctgattggaacagagatagtacgctgactttatgctcctcgcagaatgaatgaatgcggccgtataagtcgtgaggaatttcttgagaaaaccgtttcgcatcaagacccgcatctgcctggctccgtttcagggacacaagctccggcacggtctcgaactgcccgttccaaaaatcccgatcctttttaaaccgcttcgactgcacatattcctgctcagtcagcacatgctcgataaaggaaggaatctccgtctgttccatacttgctccgcccgaaagctccaaataaatatcagtaatcgcattgcccagaatcgtcatggaaatcccgtctgaaataatgtgatgcacattaacgtaaaaccagacctcattttcgctgatggtatacacggaaaaacggaataaatcctgatcatataatgccagaggcttgcttgcctcgtcacgtccccattttgacagctcttccgcagagcagccggcttgcctgatgtctgtatgttcgatagtcagcggacggtaatcgctcacatattgaacgggctccccctcatcatcaagccgcagacggattctcatcgactcataccgccggacgaattcctgtatcgctttctcaacgtaatgagcctgtacgccgtcgtcagaaatgagtttcccgaacccggcaagatttgaaatacttgtgttcggatagaatttttctgtataccagatacgtttttgagcatttgttaaaggataaaaagttatttccatatgtgtgcgcctcccctttttaagataaaattgtcaattctcccttagaaacagcctccctcaatgtccctaactcattatcaagccaaaagaaccacttacctccaaaacgatcccgattcaatcaccgccgaaatccgcaatccactcacccgcacagtccgaaatgcggctcaaatttatgagaaatcaagacaagaatccaatgtttgtaagcaacagggtttacctatttcttcatgaattactatatatctacttacgttcactttatatgaaattattgtttttatcaccgaaaaatgggtgaaaagtttcattcggcacaccgaaaaaaattccgacaattccagagggtattttgcggcatcccgcaatttatttttaaaaatattatttatgtaaaattaaaaatctttaaactatagtataaatctctcgaatatccagttatggcagaatgaaaatagttttcatatatgagctgatggggaaaaaacagcgcaagaaccgaaacaggagatttaatcgttcgcaatatgatttcattaaaccgcaaaaaaagcactctattttacatagagcgcttcaaaaagattcctttattgcagttttatcaatgttgattaattccatatattcttttccccacttatacatggcgtccaaaatcggcataagggtctctccttgctccgttaatgagtactccactttcggagggacgacagggtaaacctccctgtgaacgatcagatcctgctccagctccctgagctgattcacaagaattttgtgcgtaatatccggaattaaagctttcagctcattaaaccgctttgttccttcttttcccaggtgccacataatcagcattttccacttcccgcctatcacggcaagcgtcaattccttttcgcaattaaacgttttctcatccattcggctcacgggccattctccttcctcttactttttgtacgttcatcatctattcatacacgcttacttttttacacaactttcatcagtttatactaccacgcagttttgctgaaacaaagcgcattgcctgcggggacagtatcctcaaagtaactattagacttcaaagtgcgtacttctcaacatgcggggcactctatagaatgtaaatacatgaaaaagaggagtggatataaagtggaattacagctggcattagacttagtgaatatcccggaagcaattgaacttgtgaaagaggtcgaacaatatatagatgttgtagaaatcggcactcccgttgtcattaatgaaggcctgaaagccgtacaggaaatgaaatcagcctttcctcacctgaaagtgcttgccgatcttaaaatcatggatgcaggcggctacgagatcatgaaagcggcagaagcgggcgccgacatcatcaccgttttaggagcgacagacgactcaacgatcaaaggggcggttgccgaagcaaaaaaacagcagaaaaaaattctcgtcgacatgattaacgtaaaaaaccttgaaacacgggcaaaagaaattgaccaactcggtgttgattatatttgtgttcacacaggttatgatcttcaagcagaaggaaagaattcattcgaggaactgacggcgattaaaaaagcggtcaagagcgctaaaaccgcaattgccggaggcattaaacttgatacgcttcctgaagccatcaaacaaaacccagatttaatcattgtcggcggaggcattacgggagctgacaataaagcggatgctgctgctaaaatgaaacagctgatttcacaaggatcatgaaaacgactgaatacttacatgaaatactcaatgaaatatcccgcaccgcagcattaatagccgacagtgaagctgacaagcttgcagatgagattttatcggcagatcaaatcttcacgtccggagcggggcgttccggctttatggctaaagcgttcgccatgaggatgatgcacatcggcctgaacgcttacatcgtcggtgagacgcttacccctcccctccaagaaggcggtctcgtcatcatcggctcaggctcaggcgaaacaaaaagtctgcttcatacagctgaaaaagccaaaagccttaacggcatcatcactgcattaacgattaaccccgattcaagtctcggcaaacttgcggatcttacgataacgattcccggctctcctaaggaagagaccggcggagacagaaagacgattcagccgatgggttctttattcgaacaaactcttctgctgttttacgatgcggttattctaaaaatcatggagaaaaaagaactgaattcagcagacatgtttacaaagcatgcgaatctggaatgatttactgacggccttcttatcagatggccgtctttttatcgtcttgttgcgcacggtcatgcaggccaaggttttcgggtcggacactcgcagacgaagatatcctgccggtgagcttatcgctataataagtcaattgacgatacggccgcaaccgttcatttctgaatagggaaacggcaaaaaacactttctgatcggatatttaatgaataaaattgatttgtgcggatggttttacagatattcagctgaattgcggctgagaaatatattttaacagctttacagccggccgattctgctttattcttggaccagctttacagcaatttaaaactggaggtgattgatactcttgaaaacattaaaagcactgctgcttgttcttatcatcattgccggagcagtcgcggccctgatcaagggtgatcttttctcagataacgagcagaccgttcagaagagtgattacgacaaagtaatcctatttccgtccgatcgatatccggaaacagcaaagcatattaaggacgcgataaaagaagggcattccagcatatgcaccattgacagagacggagtacataagcggcgtgagcaatctcttaaacatgtgcctgtcaaaacgggatacgatagggatgaatggccgatggcggtttgtaaacagggcggaaacaatgcctccgtagaatatatttctccggcagacaaccgcggagccggctcttgggtcggacaccagcttaccaatgatcccgacggaacgagagtattatttaaaatcaagtaaaaaaacaggaggaacagcgcattgaataaatcatggaaaccgcaagaactggccatttcgtatcatcaatttacaatcttccaaaaagattcagaaccgcctgttatcgattggaccgatgaagccattgaaaaaggatatgcggaagctgacggagctgtttcattcgaagcaaggagaaatacgagggcatttatcgtcttcaggcttaacacaagtgaaccggtactatcctatgagaaaaaagcgactgttccctttgaggctgtaaaagatggaattgagattgaaagcgtgatgtcaaagcggcttttctttaatattccgaaaggccgatacagccttacctgttattcagtgcctgccgaaatatccgatcttcatgcggatacgtatattattgatgcagacgcaatgtaaaagaaacccctgagagaatcatatttctctcagggaacttttataaacttttaccgtttgtttcaattacattctggtaccaataaaaactgttttcctgatccgtttcaagtctttttcatcttcttcatctcgattgatatacacaaaaccgtagcgtttttgatagccgttcagccagcttaaacagatccgtgaatgaccagctgcagcagccgatgagatgaactccgtcactaatagcctctctgcacagttcacccatactgaaggtcctttaccgtcttattccaagctccttcaacctgataggcagccgaagctgacccccatagaaatgtatcagggaacagaccctgttttttatgtatcatgtgtttcatcctcctgatgcgtatgatattgatatcatacgttttgaaacgcatttcagagcaatcccgataaaaacaaaaaagcatccggcttgccggatgcttaagaatgatgatgccgcttttccaatttatgaggcggaggcttcgggacaaagccattttgtttcatcatattaaagcgcctgtccatatgctgtttaatatgttctgctttttctttcggcaggaccccgtactcaacatatttggatatgacatgtttgcgtttttcgagcacttctttttcaagtgattcaatttcttttttctgctgttccgtgagtgacattgttgaaggcatttttgtttcggcgtgtgccggcattgtgaaaaccattgctgtaatgaaaaacgcagctaaagacaatgcagcttttttcatgactctttcctcctttaacgtttgttatatgttgctccctcatccattttttatgcaaaaaaagagcgaaattattcgctcttttcaatcgattcgtccggcagtgcgtatgtgacatacgttcccgctacaaaatcgtggattgaccgtttgtcttctctcattccgaccatgaatgcgctcacgatcacaccgattccaaacgtcacgccatatatcaggccgcccacaagcactctcaaaatcatagtaagaaagcctgcctggtttccgtcttttttgacgatgcggataccgcagatctttttgccgataacataaccgttccagtatacagggagcaaaataccataaagagtcaaaatgatgctgatcattgcgctctcattcgggtcttttcctgttgccagcataaaaataatcgccaaaggcactgaagtaattaaatagtcgagtacaacggctcccaatctgatccaaaatcccgccggtctgtaaatattcatcatgtttcccctcgctatggcttcaaaatcactttaatgtcgccatcttcttttttgtcaaatatatcatatgcagcaggagcttccgcaagactcattttgtgtgtaatgatatccgtcggatcaatttcattttgttcaatcatttgatacagcatcggcatcagatgaataacgggtgcctggcccatttttaaagaaacgttgcgtgtaaaaaaatcaccgagcggaaagccgtccgcttcagaaatgtatgcgcccgtgagctgcacggttccaaacttcttaacggcttctgatgctataagaatcgggctgatcgttccgaactgattcggtttttgctctgctttttcttttgaaagcggcgtgccgtccattccgacacaatcaatcactacatccgcgccccctgacgtttgttcatgcagcagtttcccgatctcatcatgttctgaaaaattgaaggtctctgctccgtttatgcgtctcgcatgttcaaggcgatgcgggacttgatcaactgcgataacccgtttagctccttttttccacgcgaatttttgcgccattaagccgatcggacctgatcccaaaataacgactgtatctccttttttcactccgctgtgctgaacgctccaaaaggcggtcggcatgacatctgacagaagcagcacctgctcatcttcaagctcactgtctgccggaaccagaaaagaagagaaatcagcaaaaggaacacgtaaatattcagcctgcccgccgggataattaccgttaaactccgaaaaaccgaataaaccgccggcatctgtatgaggatttggatttgattcatcacactggctttccatctggtgcttgcagtaatgacattctccgcagccgatgttaaaaggaatcacgacacggtcgccttttttcagctttttgacttgactgcccgtttcttcaacgattcccatcggctcatgcccgacaatataacccggatcggcgggtattccgtttttatataaatgaaggtctgaaccgcatatcccggttgcggtgattcgaacgatgacatctctctcatcttgaatggcgggtgccgggacttctttcacttccatatgttcttttccttggtatgtcaatgctttcacacttggtcagctcctttttcatcactccttcccttttcacctgcttctaaacttggccggtatgttattcggcccgctgaatatcccattgaaaaggatcttcaagctgcgaccaatcagaatcgaactcagactgcgtgagcaggcactgatccaattcctttgtaatggcggcttcatctaaatctgttccgataaacaccaagttcgtatgacgatctccgaattggtcgtcccaatcttccagaatctccggttcctgctttttgatctgctcctgctcaagtttcggcattgccgccacccaataagaaacaggctcaatcgaaaccgccggacccgcctgagacatcagcagcgcaaggctgttgcgggttgcgcaccaaacaattccttttgcgcgcacaatgttgtcaggcattgattgatgcagccagctgtcaaaacgaacggtatgaaacggcagacgccgcgagtacacaaacgaagtgatgccgtactcttccgtttccggagtgtgcgcttcatgacctgccgtcagttcctttatccatcctgctgatgaactcgcttcctcaaactcaaataaaccggtattcaatatgcattcggcgggcacttctccgcgaacggaccggatcagtctggcacggggctgtaatgcgcgaagaaccgtttccagctgttcaagctctttttcgcccaccatgtcgcatttatttaaaatgagcacatcacaaaactcaatttggtcaattaataaatcggcaatctcccgttcatcctcttctcccgccgcttccttccggtcaagaaggctgtcaccggactggaaatcatgccagaagcggtttgcatccaccacggtcaccattgtgtccagcctgcagaatgttgtcagatcaatgcccatttcttcatctatataagaaaatgtctgggcaactggaatcggttcgctgatccctgttgattcaatgacaatataatcaaacctgccgtctttcgcgagtttctcaacttcgactaataaatcttcacgcagcgtgcagcagatacagccgttggataattctacaagtttctcatccgtccttgacaaaccgcctccctgcttcaccaagcccgcgtctatatttacttcgctcatgtcattgacgatgacggcaatttttaaaccgttgcggttttgtaaaatatgattcaaaacggtcgtctttccggcaccaagatagccgctcaatactgtaaccggaatttttttcatatcaatagccccctgataaaatagaatgattacgatttatatctcgcaactgccttattttcatcatgatgtacatagttttaaatcgcaatcgttactatttattttgatgtattctccgtttaaaatcaagtaaaagtcagacacatcacacgttgtttgtccccatccattggtctgacacgcaaaacgtcaacgatttaattggtgaagccttggatccggactgtaaaatgcccggttttaagatgtgtgcggtacgaatcatccctatctaattttcataaaatttttagattttttcgtattttttgttacatttcataacatgcatcttaaatatttgtttttgctgtgctacgctgaaaaaaacaaagataaggagcggatcatctgatgggaaaaaaacagctagtccttgttggaaatggaatggccggggtaagagcgattgaagaaatactgcgtgtttcaaaagacgaatttgagattacaatattcggggccgaacctcatcccaactataaccgaatccttctgtcaaaagtgctgcaaggcgataccgacattcaagacattacgttaaacgattggaactggtacaaagaaaacaacattcagctgtataccggtgaaacagtcatcaaagtcgacacggaaaaccaaaccgtcatcaccgatgcagacagaatccagccttacgatgaactcatcctggcgacaggctctgtcccttttatccttccgattccgggcgcagacaaacaaggcgtcacggcattccgagacataaaagataccgacacgatgctcgccgcgtcaaaacaatataaaaaagcagccgtcatcggcggaggactgctgggtttggaagccgcgcgcggactgctgaatctcggcatggacgtgtctgtcatccacctcgccccattcctgatggagcgccagcttgacgcagcggcgggacgcctgctgcaaaacgagttagaaaaacaaggcatgacatttttccttgaaaaacaaaccgaagaaattctcggtactgaccgtgtcgaaggcgtacgctttaaagacggcacaagcatcgaagctgatctggtcgtcatggcggtcggcatccgcccgaatacacagcttggcacagaaagcggcatcccggtaaaccgcggaatcattgtcaacgattatatgcagactgaaattccgcacatttacgcggtcggtgaatgtgccgagcaccgcggaatcgcgtacggtcttgtggcgccgctctatgaacaggcaaaagtgctggccaaacatatttgcggcattgaaacaaaaccgtacgaaggctccgttctctccactcaattaaaggtatcaggcgtcgaggtcttctctgccggcgactttgatgaatcagaggacaaaaaggcaataaaagtgttcgatgaacaggacggcatttataaaaaaatcgtcctgaggggcaatcaaattgtcggcgctgttttgttcggagacagcagcgaaggcaaccgcctgttttctatgattcaaaaagaagcagatatctctgaaacctccaaaatatcaatcttacagcctcttgatcaggaagcaggcgtaagcatgaccgcggcgatgagcgacgatgaaatcatctgcggctgcaacggcgtttcaaaaggtgccattattcaagccattcaggaaaaaggctgcacatcaacggacgaaatcaaagcatgcaccggggcatcccgttcctgcggaggctgtaaaccgctcgtagaagacattcttcaatatacactgggctcagaatttgactcatccgcgcaaaaagaagcgatttgcggctgcacctcactgtcgagagatgaagtcgtagaagaaatcaaagccaaagggctctcacatacgagagaaatcatgaacgtgctcggctggaaaacgccggaaggctgctccaaatgccggcctgccctcaactactacttaggcatgattaatccggctacatacgaggatgacagaacatcccgttttgtgaacgaacggatgcacgccaatattcaaaaagacggaacatactcagtcgttccccggatgtacgggggcgtaaccaactctcaagatctccgcaagatcgccgatgtcgtcgacaaatatgagatcccgctcgttaaaatgaccggcggccagcgaattgatctcatcggcgttaaaaaagaagatctgccgaaagtatgggccgagcttgatatgccgtcaggctacgcgtacggaaaaacactccgcacggtaaaaacgtgcgtaggcgaacaattctgccgcttcggcacacaagactccatggcactgggtattgcgcttgagaaaaaattcgaagggctcaatacgcctcataaggttaaaatggccgtgtccgcctgcccgcggaactgtgcggaatcaggcattaaggaccttggcgttgtcggcatcgacggaggctgggagctttatgtcggcggaaacggcggaacccatttgcgcgccggtgatttgctgatgaaagtaaaaacgaatgaagaagtcttagaatacgcgggtgcttaccttcagtactacagagaaacggcaaactatctggagcggacatccgcatggcttgagcgcgtcggtttatctcatgtccaatccgtattaaacgatccggaaaaacggcaggagctcaacgacagaatgaatgagacactctctgtccacaaagatccgtggcaatacttccttaaagataaaaaagcttctaaagatctattcgaaaatgtcgtcacgacttcataaaacagtaagggggaacggacatggttaataaagatatgacaaaggtttgcataggcaatgtaaacgaattacccgaggagttaggaaaaaccgtatatatagaagataaagagcttgccgtatttaagctttctgacgggagcgtccgcgccgtcgaaaaccgctgtccccataaagagggcgtcctggctgaaggcatcgtcagcggagaatacgtcttctgcccgatgcatgactggaaaatttccttagaagacggaaaagtccaagagccggatcatggctgtgtcaaaacatacgaaacactgatcgaaggagagaatgtatacctcctgtattgatcaaagaccggatcacttttccaagtggtccttcattttttaaattgctgaagggatgacgccatcatgaaaaacggaatcgtatactttgtcggtgccggaccaggagacccggggctgatcaccgtaaaaggaaaacaggctctggagaaagcggatatcattttgtatgaccggctcgcaaacccaaagtttctagaatacgcctcaccggactgccggttcatttattgcggaaagctgcccgaccgccattttatgaaacagtctgagataaatgccctgctgatagaaaaagcggcggagggctacaccgtcgtccgcttgaaaggcggagacccaagtgtgttcggcagggtcggcgaagaggcagaggcgcttcatcagcacggcatccgctacgaaatggtgcccggcatcacctcgggaattgcagcgccgctgtatgcgggagtccccgtcacccatcgtgatttcgcttcgtccttcgcgatgatcaccgctcatgatacatcattgcacggcaggccgaatctcgactgggaagggcttgcccgaagcgttcaaacgcttgtgttttacatgggcgttaaaaatctgtcatttatatgcaggaagcttatggagtacggaaaatccccttccgttcccgtactcgtcattcaatgggggacgtggggacggcagcggagcgttaaaggaacgcttcaggatatccatgaaaaagttcaaagccaaaacatcaccaaccctgccattatcgtcatcggtgatattgtcaattttcaaacacacagctggtttgaaagcaaaccgttcatcggacggcatatcatggtggtcactcatggggatgatgaacatacattgacagacaagctgcgcgagtatggcgccgatgttattgaatggccgaagcggatcgttaaaaaaatgcccgcaaacgaaaacatcctgaaacagatcagcacctttgaacaactatttttcacatcacgccttgcggtatgcgaattctttgacacactggctttcaagcagatcgacatccgccgggtgaccgcaagcctgaatgcagcgactgaagccgcaaagacggaactgacaaaacggggctttctcctatccgaatggcaaaatgattctccgcattctctcattgtagggagccgtcaagcagcagaaaacttgccagactcaaaatcatgcctgttttatatcacccatgaacatatcgcggatgagcgattcacttccatgatcgaacgcacgatcagtgagtcacctctgcaaatgattatctgtacgggcaaagaatccgctcagcatttgatcagcgccggaaaacaaatcggcatatcaccgaacccgagaggaaaccgccctcccgtcatctgcatgggcgaagacctccccgccggctgcgggtttaccgccgtgaaaaatcaggaacagttatttgcgtttatacgaaatgaaatgaaagacatgctcgttcacagctgatacgccggaatgcttttctgacccccggacccagcatcggggggcagcccttttttattgtgtcaccaattttttatgatgagtcgaatacatcgccatctgatccgcatgcgggtccaaataggctttggcgctgttcactgcggtcggcccctccgtgaaaccgccggcaatcagtctgagcttgctttcataatgggcggcgtcaccggcgacaaacacgcccggaagattcgtgcgcatatgcctgtcagctttaatcctgccttcttctatctcaagcccccagtccttcatcggaccgagatcaattttaaacccgtggttgataatgagctcatcaagcttgatgacttcagaaagtccggactcagtttggcaaacggtgacgctctcgatccgttccccggtgccgttgagatgcttcagacgatacggcgcaagcacccgcacggaagaccgcttcattttcgccacgctgctttccaaaccgccaaactcctcacggcggtgcaagacggtaacagacgccgcaatcggttccagctcattcgcccagtcaaccgcggtatctccccctccggaaatcacgacatgcttatctcgaaacgcatcaagcttctccaccttataatgaaggttctttcctgaataacggctcgcatccgcgctgtcaagttcattgacctcaagcgtccccatgccgacggccaaaatcaccgtgcgcgtatagtgcttttccccttcggaactttcgagcacaatggttccgtcttccagccgttcaaatccggccacccgctgattcaacacgatatccggctcaaatgtcgccgcctgctccttcagctgcttaatcagctgttccccggcaatcccgggtattccgccgatatcacggatgattttttcaggaaaaaacatagacacctttcccccgagccgcggcaaaaactcgatcactttcgttttcagctcccgcatcccgcaataaaaagccgcaaacaggccgatcgggcctccgcctataatcgtgacgtcgtacacctcatgattttccgccatcgttctgcctcccgtttatatctatacttcatacttttttaattgagaatcaatatcaatgaaagtataacatatattgaggagcagtgtttattcatttctcatcttgcgggaaaggagtgattcagaagtgaggttctgagattgataagcgggaaggtattaaaactgaaaccagtacggcgactggtttcttttttatctctttttcatcagcatgatatcgagatacagctggcaccttgtcctgaagtcgtttaaattaattgatgtcatgtcaagaatctgtttgatgcggtagttcaatgtgttttgatgaataaaaagctgttctgcggctggttttgttttgcagttattgaggagatagatttctaacgttttcagcagttcggtgctgctttctctgtctttggcttttaataacgctaaatcatcgtttacatattccagtgaggcgtttttttcttcgatgctttcaagatagcggtaaatcccgagcttactgtattcgtacgggatattttcctggtttccggtaatttcggcggcctttataacttcaagggcttctatataacttttgccgagcttcaggatgctgctgtattcattgccgattccgatatagatgggagtggggatcttctgaaagtgaaaatgagtcagcagtttgtggatgaattcagatgctgccgaagtgccggagcttttttgcgagaagcttgcgacgacgatgacaatattggaatcaatggttaagacgtggctgactttatcccgcaaattcaagtacgatttgatattttcctttacatcttcgactgcctccccatccccatttgcggcgtgcaggacgactaccgaaaaaaccgacggcagcacggcgttcatcttttccgcttcccgcctgaactccttttcagaggagaattgctgaaagatcgcccgtttcaccaggtcttccgctctctcttctttttcctgtttcagccggttcgttttgtagatgatttttccgacatggaatgaagtttcatataaaaaatcgagctcctcgtccgtcaagtttcggtcgagctcctgaatccagatgtagcccatcacttcccctttatgttttgcgcttacaaccactctctgattcaatccgatactgtctattttttcgacacggaacggttcaggaacggttttcagcttttcgatcaccccgtccttcagaaacctttcaaaaatctgcacggggcatttttttgagaatatcgtctgctggttggcggagtcgaagtgattaatgtaataagaattataggcaagcaaaaagaaatccgcgctttccagaataacgggcttctgcaattcataactgatgaaatcaattaatttatcaatgtccgtaaatgaaaaaactctctctaaaagctcttccatacctatttctcctatgctctttttatctttatcatactctgaggggtgactttttgtatagaaaaaaattcatatactcccaaaacggaatgatccgaaagcctgtatcgtgaaaagaggaaaaagggcggtcccttcttcctctcgttccttgcttttattgagaaagtgtatcacggtagtcatgaaactgatctgtgacatcttttgacggagcctgtgtcaataagctgacaacaaatacagcggcaaggcttacagcaaagcccggaatgatttcgtacaaaaagtctgaaagactggcattcgcccaaatgattacggtaatcgctcccgcaatcatgccggcgagtgccccccatttcgtcatccgtttccaaaataaactgagcagtacgaccggcccgaatgaagcgccgaatcccgcccatgcatagctgacaagaccaagtatcgtgttgtttttctcccaggcgagcaccaaagcgatgattgacaccgcaagcactgccattctccccagaaatacgagttccttatcagaagctgaacgcctgaacatggacttatacaaatcctctactaaagaactggacgtaacgagcagctgagacgaaatcgtactcataatggccgctaaaatcgcagaaatgagaaatcccgtaataatcgggtggaacagaatgttgccgagctgaataaaaatggtttccggatcagccagcttcaacccgcgctggtggtaatacgcgattcccgcaagacccgtaaacagcgcgccgagtgcagacaaaatcatccatcccattccgatccgtctggcgcgtttgatctctttcacagatgtgatcgccataaaacgcacaataatatgcggctgcccgaaatagccgagcccccacgcaaataaagaaataatgccgaggacggtcgtccctttgaacatattaaacagttccgggttgacggaacggatatcggcaacggtttcccccgggccgcccgtatggaaaatcgtcacaatcggcacaagaataagcgccgcaaacataatgatcccttgaacaaagtccgtccagcttaccgccaaaaagcccccgaacaaggtgtaggcgacaacgacgcctgtcacgacccacagtcccgtgtggtaattcaaccctaaaatgctgttgaataagacacctccggacaccatgccggatgatacgtaaaaagtgaaaaagacgagaatgacgagacccgaaaacagtctgagaagcttcgtatgatcaccgaaacggttttcaaggaaacccggaatggtgatggaattccccgctttttcggtatacgttctcagtctcggcgcgacgaaaagccagttcgcccacgccccgagcacaagtccgatcacaatccaagcgccgcttaatcccgttgagaacatggcgcccggaagccccatcaagagccatccgctcatatccgccgcccccgcgctgagcgctgtgacggcagggcctaaagaacgccccccgagcatgtaatccgtcagatttgacgtccgtctgtaggcaaaataaccgataaacagcatgcccgccatataaatacaaatggaaataatcaactgaatgtttgctatggcatttcctcctccgctttatatgtttatggtgaaatggacaccccccgcgaggaggatgcccattcagtccctcttaaaacatttcactgattgttttcgcctgcatgtgaagggccaaataatccgggccgcccgcttttgaatcagtgccggacattttgaagcctccgaacggatggtagccgacaatcgctcccgtacaattgcggttgaagtacaggttgccgacatggaattcctgtttcgcccgttcaatatgtttgcggttatttgtaatgaccgcgcctgtcaaaccgtattcagtattgttggccacttccagtgcttcatcaaagtttgatactttagaaaacgccacgaccggcccgaaaatttcttcctgcatgagtctggctttcggatcaaggtcagcgaagatcgtcggcttgataaagtagccttttgaatcatctccggtgccgccgcttactaaacggccttcttcttttccgatttcaatgtagctcatgatcttgtcgtaagaaccttggtcgatgacaggtcccatatacacgtcagcgctgtcagggcttgccgtcacttttgattcagtgatttcgatgacgcgctctaatacttgatcatacactttttcatggacaactgcacgtgaacctgcagaacatttttgtccagcgaagccgaatgctgatgtaaagatggattgagccgccaattcaatgtccgcgtcctcatcgacaacaaccgtatctttaccgcccatttcagcgataacacgctttaagtgctgctggcccggctgcactttcgccgcgcgttcgaaaattctcgtaccgacttcacgtgatcccgtaaacgtaatgatgcttgttttcgggtgatcgacgagatagtctcccacttccgctccgcttcccggcacaaagttgacaacgcccttcggaagacctgattcctcaagcacttctacgaacttcgccgcgatgaccggtgtcgcgcttgccggtttaagaacgaccgtgttgcccgttacgatcggtgccaccgtcgttcccgccataatcgcaaagaggaagttccatggcggaatgacgaccgttacgccggtcggtgtgtagacatattggttcttctcgccttcgcggctgttgaccggcttgccttttgccaattcaaccatctggcgcgcgtagtattccataaagtcgatggcttccgccgtatccgcatcagcttcattccaaggctttccggcttccttgacgagcagggcggagaattcgtgctttctgcggcggactttggcagccgcgcggaacaaaacggcagctctttcttcaggggatgtgtatctccactcttcgaacgctttcgcagccgcttcaatcgcctgctcagcgtgctcctgggacgcctttgacacttttccgacgacttcttctttgtctgcagggttaatggatacgattttcgcttccgtctctaccttttcaccgttgatgacgagcggataatcttttcccagatactcatttaccgtcgcaagcgctttcttaaattcttcaacgttcgattgatcttggaaattcgtgaatggttcgtgtttataaggtgtagtcattgtcatctctcccttttttacttcttagtcattcctttaaaggcgaatgcgatgtttgaggggcgctcggcgagccgtctcatgaaatagccgtaccagtcatccccgtaaggcaggtagactctcatacggtatccttcttccaccaggctgagctgggtttgcgagcgcatgccgtacagcatctgaaactcaaaacggtcgtttggaatgccgtgctcttcggcaagctgttttgtaaactcgatcattttgtcatcatgcgtggcaactgccgtataatgtccttttaaaagctgtttgcggatgagtcttttataattttcatcgacgtcgcttttttcaggataggccaccttttccgattctttataggcccctttgacaagccgcagaaacggattcagcgggctgaggtcatcaagatccttctccgttctgtacagataagcctgcaccacggtgcttacatattcataccggctccggaagtctttaaagatatccagcgttttctggcatctcgtttcatcttccatgtcaatcgtcaccatgactttatgtttttcagccgtctggaggattttcgtcatattttcatagacgagatcaagatctatatcaagacctaaagacgtcatttttaatgacacttgggaattcagctgttcatcagcaattaaggcgatggtctgcatgcactcctcggtgcgttctttcgcaacgtcaccgttgttgacaaattcccccaaatgatcgacagtaactgacagcccctggctgttcaaatgtcggattgtcgggatagaactgcggaaatccattcctccgatgattttgccggctgccacacggcttccccagcttcgcgccatcttattgagaaagctgctcttggataaaaataagaaaaaatctcttgtaatcacttccaaccttaacaccccgcaatctaagaagtatttgtatgagtctattgtaaatggacaaaacatcctctcacaatattctaaaaatacaaagattctgataaatttttgtggttttaccacaatcagcttcttagatagcaggcggattatgccgaaaaaaggcggacggaaatgacggcaatcgtcaatttccgcctttttccccccacgcctcttcgacggtctgaatcaatagctgattcagttcctccgttatgtcaggtttcggtgttttgatcgttttgacatagtgcccgatgcgttctatttcttcttctataaacgcgtgaatgatcatatttctcggttccggagccagctcctgaccgctttttttccttgtaagcagtgtattgatttcagaaatgagcgcttcatccgtcaataaggcatcggccagtacgggaaatgacatcggcggtacggagccgaacgtttcaatccatctgcaggcaaggagaggacgcaaaacataaaaatactttttaatcttcacttcactgccctgcaattccgttttttcattccgttttgccatattgagataatgataaatgccggcttcaggcgaaaaggcgcggattttcagttttcgaagcttttcagccgctgagaaagcttcataatagatcatctcagaagagagccattccaaaagaggcggatttgattttttaaaaagccgcagcgcttttctcagttcccagccgctgatgtcaagcatgtcatgaatcggctcttctatgacatccctatgcggttcgatcgaaaagtaccattcttttttcggcacatagagaaaccgcacatcgtagtcgctgtcgcttgacggaaatccccatgcgcggctccctgattctacggcgtaaagcaccttgacgccgtgctgtgcttcaattcgttttaattcttcgatgatcctttgttccatctgtatccgtccttttccgtgatcattcctgaaaaaagcccaagtacttgggcttttcgctgtcgtcagcctttcagatgcgctttcagaaaggccagcttttccttatggaaagaaggtatgtattcatgtccgaaataccggtaaaccttcaattctttttccgtttccagatgattgtaagcggcaaacaccgtcgacggcggagtcacgcggtcaatcagcccgatagacatgagcaccggaacttttacgcggtccgccagattcatgatatcaaaataggccagtgtattcatcgcggccttctccgtctcagggctgccgttctttctgaaaaaagagttaatctcaagatacggctcatcaagagcgacatcaatggcccgctcaaaattgcttaaataaggataatcggccgcaaccgctctcggaatgtcagatagtgccgccgcggcgattgaaagtccgcctccctggctccccccgatgacggcgattctcgtctcatccacttcatcaaagccgctgatgacttccaaagcccggacggcgtctaagtacacgccgcggtaataatatgtatctttatctaaaatccctttcgtcatccagccgggaacgtgtccgtgcggtgagacgcttgtatctgtgctgctgtgctggccgcggacaagcatgccgaacgcggcatatccgtgaagcgcccaatttacgatgtcatgtatatctccgtcataactcgcgttgtagccgtgatatttcacgatggccggatgcggtccttgccggtcgggaacggcgtaccatccctcaatttccgccttgccgaagcttcggtatgtcagccggaatactttcacgccgtcagccgggtagctttcagccgtcaattcaggctttgcctcttcctttgcaagctcatgtaatgatgatgcccaaaaatccgaaaagtcatgaggagcggttttatttggtttataggtttgcagttggtcgagcggcaagtcgtataattgcatatccgattattctcctttgttttataagatttaattttctgactctatcttaacacgattttacactcattttctaaacattttaataaacgtttgtttaaaagaaaacaaaaaagccgtacgctcacagcgtcacggctctttttacatcggctgatacagatcccagccgatttttaacgtttctacgatataatcggcgatttcttctggttccagattatccgtcgccacttttgaattatgtttatcatagatgctttggcgctcgttaaagagctgctgcatttcatccatggaacggttatgcagaacgggacggctttcaatcagcaggtcagcccgctgcttccaattctcccatgataaatcaagatggagcacgagacagttttcgaggcagcactgtctgattgcctcttgtttaaacgaaccgcccccaagcgacacgatcttgaatttcgtattgcggcagatatctaatatatagtccttttcagtttgacggaaaaaggcttcaccttttttctcaaacatttcagggatggacatattgaaatctttctcaatctgcaaatcaatatcaatgaagtctctgtataatttcttagcgaccagctggccgattgttgtctttccgacacccatgaatccgatcagtacgatgtttctttctcttacgggaatggcacgttttgcgttcatcttcggcgaaatcctcctaagaaatgaaaaagttatgtttattatatgataacccaatattgaaatatagagataatgcaataaaagaaaacccatcctttataagaagagatgagtttttctttctatcggagcgtaatgcgttccacctttccgacaatgaaaatataagaaaatgccccgataaatgcgacagcgccgacaaacagaatcgctccgttatatgaaccggtcgcagaaacgataaacccgatgataagcggggtgataatgccggccatattggcgaaaaagttaaacacgcctcctgccaatccgattgtttcgcttggcgccacctcactcagcatcgtccaggatatattggacatgccctgcgcaaaagaagcaatggataagatcgtcaaaaccgcaggagcagaatccgtaacattcgcgagcacgatggagcctgtcagcagaagaccgaggatgacgggggttttccgggcaacgttcaccgacacgccccgtttcatcattccgtcagaccaatatccgccgaacaatacgccgaaaaaggcggcgatatacgggattgatgcggcgaagccgacttttaagaatgccatgtgctttgcctccgccagataagtcggaaaccatgtcaaaaagaagaacagcgtggaggctacggcgaattggccgatatacaagccgacaagcttgcggtatttaagaagctggacgaaatcccgccacgtgatcctgccggctgattcagacacctctgtcagtccgccgccttctctaatataatcaagctcttcccggttcactttccggtaccgattcggctcgtgatacattttgaaccagaaaacggagaaaacaagcccgagcacccctgaggaaataaagacggcgcgccagtcaaatgccgttaacacccagaataaaaccggtgtggcgaacgccagtcccacatattcccccgccgtataaacacccgtggcaaaggcgcgttcccgccttggaaaccatgtcgtgacaatccgattgtttgccggaaacgcaggcgattcagccagcccgataatcaggcggcagccgaataaaaatccgaaactggctgcaaaagcctgcactccggtgaaaacagaccagatcattaaagaaacgccgtacgtccgttttgacccgaatttgtccaaaatgagcccgccgggaatctgcatacccgtataggtccagctgaatgcggaaaagacgacgcccaaaagcgcggggcttatgttcagcgatgtctgaatggacggggcggcgatggatacactggcacggtctatataattaatcgcagtgataaaaaacaaaagaaacagtatcacataacgagcgcgagtcggtttattgcggacgggactgaagtccgtcagctccgtttcatttttcaatggcttctccccccttactcgaatgaaattaattgtacaacacttcggtcaattatttaatactttgacgcaaaaaagcgctaaacaatttgtgcgccgcactgacactccgcttataaaagtgtctgcccttttcacctgtttatccgtatctcacccggggaaaagtacacatatgatagacagttacgggaggattaccgatgaaactgagtttttgcacgacaggatttaaaaaaaagcatattttcgacatcatttctttcgcgaaggagcactcctttgacggaatcgaactgtggtacggacacgctaaacaatatatagaggaaatcggcccgctcgacaggcttgatcagcagcttcaggaggaaggcctcggggtgcctgccgtcagtttgtacactgacttcgccgctcaggatgaaaggcaggcgttaaaggatgttcaaggggcattaagcgcggcacgacagctgcacagccccttgatcagagtctttgccggcaatcttccttcgcatcggacgtcaccggaaaagtggcaacgtgcggttgatcaatttcagcaggcggcacggctcgcagatgactatgaagtcgatatcgggcttgagattcattacgatacgtacgcggatacaccggaggcggcactggcatttttggaggatgtcggacatccgcgggtccgcaccatttttgacggctccaacctacacgtcaatcacgttgaccaaatgtccgctttagaaaagctgtatcataccgtcagccatattcatctgaaaaactatcactggaattttgacaactggtatctcagcaagccaactccgattttccaaggagatctcgatcaaaaagcatttttaaaagagctgatgaacagacaatatgacggttttgtttctcttgagtattttggagaacatgcctttacgcatataaaggaatcgctccgggaatatacgtctgttttttcccgctgactcttcgatcgaagggtcttttttttgtatcatatagaaaaagggggatatcatgatgatcatttggataaatggggctttcggttccggaaaaacacaaacagcgtttgaactgcacagaagactgaaaccgtcttacgtatatgatcctgaaaagatggggtttgcgatgcgttcgatgataccgccggatatcgctgaagatgactttcaaagctaccctctgtggcgggaattcaattacagcatgctttcctatttgtcagatacatatcagggcatcatcattgtgcccatgaccattacgaacgatcaatacttccatgacattatcagcaggctgagacaggatggccggaccattcaccactttaccctgctggcttcaaaggaaacattgctgaaacgcctgcgcaccagagcggaaggaaaaaactcctgggccgcaaaacaaatcgaccgctgtatcaacagcctgtctgatagcctcttcgcagaacatctccatacagaccaaatgtctattcagcaggccgcagaaacgatcgctgcccaagcaaatctgcctcttgagcctgattcgagaggcagccttcgaagatttaccgacaaattaatggtgaagctgaatcatatccgtatcaaataaaaaagcgttttgaaaacatgtccctgacccatgcaaatggatcaataaataaaaagtccctccgaagggatgtttttttcaatttaagaaaaaaattttagaaataaaggaggaattatatggataatcgtctaattattaacactgtaatacatttcatttgaaaagggagtgttcgaaatgaaattcaaaaaagtgttaaccggttctgcgctgtctcttgccttactgatgtctgccgctcctgcctttgccgcatcaccaacagcatccccatccgtggaaaatagcccaatctcaacgaaagcagatgccggcattaatgccatcaagcccgttccaagccctaacggtattttcgctgcttctttcgaactgaatggtacaacatggatttttaaatacaaatactatgacagcagcaaagggtattgggtagggatttatgaaagtgtagataaataaaaatgaaataaacaaaaaacctccctttcaaaagggaggtttttttcattctatttccaccaatcatcaaacatcgatgccggcacctggcgcttgtgctccgtactgaggtagcgtttttccagcgcttcaatcacttcggaagaaacatccttgccttctaaataatcatcaatgtcattgtatgtgatgccgagctcggtctcatccgtctgctgcggtttttcatcgagcagatcggccgtcggtaatttcaaatacaggcgttccggcgcgccgagttcttctaataaacgtctgccctggcgtttcgttaatccggtcagcggcagcagatcagctccgccgtcaccgtatttcgtgaagaaaccggtcaccgcctcggccgcatggtcggttccgatgacaagcagcccctcttgtccgccgatggcatattgagcgatcattctcattctggcttttacatttcctttgttaaagtcagacagctgatcgcccgtgtcttttttatactgatcagcgaacgcgctgacagcggacttaatatcaaatgtccatgatttatcaggtttaatgaatttgagcgccaattgggcgtcatcctcatcttgctgtgtgccgtgcggaaggcggacggcgataaattcagcgtttccgccttcttctctgatgctttcagccgccaattgggcgaggcgtcccgcaagcgtggaatcctgccccccgctgatgccgagaacaaagcctttggcacctgtttttttcaaatattgtttcagaaagttcactctgtcctcaatttcttgtttcggatcaattgagggttttacatgaagatcattcataatttgtttctggatgctcatcccaatcactcctcctgcattgtttctttatgattcatttcccgttcatactgaaaatgaatcatgccactatgtacgactctttgttaaatatagcacaggtgcagtttttaagtgaaccaaatacaccgggatcagctgatttccacccgcagcgccgtgatgctgtccccgttgcatttccctttttcgatcggacaggatgaaaacgcgacgacgagatccatttccgcacggagccgtacataatcacccgcgtcagaaagaggggtttcgactgataagttccccttctcatcgagcaccgtgttcataaagatggcaaatgggtaatgcatatgcggccgcggcaccccgaacggttcaagcgccccgctcatattgtcatagcacgtatcctggagctcgtccttatgctttccgtataaaagcctgttcatatccggacggcaggcgggaagcagcaagtcgtgcttgccgactgtatcctcaatcagcgtcagcatcggcttgtataaatttgaataaatatgatcacctgtttttacatgaatggactggttggcatcgatcgtcgcgccctgatcaagatgttcataaaagtccttggcatgatacgccgtaaaatcagccacctgctgcccttccacatcgactacttttataatctgccctttgtgaaccttcaggccgagcccttttttcggcggtacgataaattgctgtgtcatcagactgctcctttttttcttctattatgaaccccggccgtttgtttcatgtaaagcaatttattggatgtatattccccttctgacggccgcaatctaagctttgataaaggggttgaacttcatgagtaaatcacaggaccagcctaaagggaatctcgcttggtggcagctctccttaatcggtgtcggctgcacaatcgggacgggcttttttctcgggtccagcatcgctattgtcaaaagcggatattccgcgctgatctcatttcttattgccgggcttggcacctattttgtctttgagcagctcgcgaagctctcggccaaacagcccgaaaaggggtctttttgcgcttatgcgagaaaggctttcggcacttgggccggtttcagcaacggatgggtgtactggtcgtccgagatgctgatcacgggaagccagctgacagcgatctcgctgtttacgaagcattggtttccgaatgtgccgctgtggattttcgcctccatctatgcggtgctcggtcttttgattatatttacggggctgtccgtttttcaaaaaacggaaaatgtgctcgctgttgtcaagacggcggcgattgttatgtttatcgtcatcgccatattggcgctgtgcggtatattttctcataaaccggatgtgcaggtgccgaacgaatcaaaggatttgttcccgcacggagcgatggggttatggacgggattgatttatgcgttttacgccttcggaggaattgaagtcttggggctgatgaccgtgcatttgaaaaagccggaggaagcctcaaaatcaggccggctgatgcttgccgttcttgcggtgatttacgtcatttctctcggcctggcgctgctgttagtgccgctgggcaaattcaccgaacaggacagcccgtttattacatcgctgaagggttttcatttagatatcattcttgatatttttaacgggatttttattattgcgggattttccacgctcgtcgcctcgctgtttgcggtgacgacattgctttgtacaatggctgatgacggagatgcgccgaaatgcttcagattaaaggaaaacaaaaaaatctgctggcccgcgctcggattgacgtttgccggactcatcgtctccatcatcctgtcattggtgctgccgaaaaacatatatgaacacatgacaaccgcggcgggcctcatgcttctttatacgtggctgttcattttgttctcgggcaagaaactgcttgaaacgacaaagatgggaaccgtacagattgttatcgcccttgtgctgattgtcgcggccgtctccgggacgctgtttgagaaatcgagccggcccggttttctggtcagcctttgttttctcgccgtcattgcgatcgtgacatggatcgtacaaaaaaagcagggacacagccctgccggatcatagcttatttcgtcggtttaaacagtctcttcaaataagaaaagggacactttgacacttgggtctcatcatcacggaggaaatattgcttccattctaaattgtcttttcctccgtaccaccccaatcggggatgaagaggggcttcatcatacgcctctaagcgttttctgatcagccggctcatgtttcgtccgaacgcggttgaatcatttaatccttcaaaaacccatctcggctgaaacgccagcataaaaaacgggaagcttctgctttgtctcgcttcatgcgcaggcgtcgcgcacagaataaaatacggctcgccgtcaaagcagaactcccatttataatgttcagggtcttccggtatgtcttccggccagtctttcgggtcgcagccgctcagccggtttaaaaaagaccagaacagctcttcatacgcctcaacggaataatgctcagctaaatcctcaggcgtatcaaaaatcacaagcagcgacgcgtattttccggtattccttgagatctttccgtactcggacagcagcatccccacttcctccggggttccctcttcgcggggatcacccgcaaaggatatccggagctgatctgtcaaaaatccctgacgtccgggaatgcacggaaacgtatccgctttatcgcctactttttctgatagaagctcaaaagcgattctctgccaatttggcagatccaataacttttcctcaaggcaactttttgtgtacagcccgcttgccatcggcccacctccagtatcgtcaggatacgttatgatggagacaggcgataggtgacagtccttctatttatgagatgagcatttgaatcccctgccagccgaaataaaatccgaaaacgatcaaagacacacccgccgctcccgtcagccagcgaagcgctgtttcatgaagaagatttctgaaagtgctcgcagcgaccgccatgcagaaatcccagatcaaaatgccgagaagaatgccggagctgtaaatcaaaagctgatttgcatcgaaggattcagcggttttggcgagaatgctcccgtatatgccgagccagaataaaatgctcagcggattggaaagagaaataaaaaaccccgcgccgaaagttttgtaaaaagccggttttccttttccgcttctgacattcatggcttcccttatattttttaacgtttcgactcccgtgtaggtcagcacgaaaaaaccgaagagccacaaaaacgtttttacaaaaggagcggtcaaaaattgagacagcccgaaatagatcaaaatcatatacagcccgtccgcggccatggcgccgagaccgaaaatccatgcatgccaaaagccgtttttgatgcctttgtcaatttgcgccgcattgaccgggccgacaggtgctgacaatgacagcccgagaacgatgtagcttaaaaagatgttcattggcttccccctcattcatgcaacttgtacaagttattcatgaatgggccgtgctatgatacattattttaatttctcaagctcgtcttccatcatgtccgtcgcttttcctaaaaaatcgaatatcagccgcagttcttcttctttatattgccggcaaaggctgatcgtggactgggataaggagctgaataattgcttcacattcgcttttccggctgtcagcggcacgatgatcacccgccgtttgtcttcggggtcttttttcctcatgacatatcccgctttttcgagccggtcaatgagcgccgttaccgaacctgtgctgaggccggtttttttcccgagctcgcctgcggtcatcgggcctgcttcatttaagatatcagctgatttcaaatcggtcggaaacagaccgagagattgagcggccgcctgatgaaacaggatcgtccttgtggccatcttccggaataactgtatggcggtttcctccgtctcgcttctggtatttcttgttgacaactgacaggcctccctataaaatcaatttatcttgacgatcaagataattttcggcaaatctaatatgatcatagcaaatttaatgatcaaaagtaagtatgggaggaaaaagcatggaacaaacagccgcgaaggacgcctcgacgaagtttgtcgtcatcggtcttttgctgggcattttaatgtcggctatggataatacaatcgttgccactgcgatgggaaatatcgtggcggacctcggaagtttcgataagttcgcgtgggtgacggcatcatacatggtagccgttatggccggtatgccgatttacggaaaactgtccgatatgtacggacgcaagcgtttctttttattcggtcttattcttttcttaatcggatctgcattatgcggaatcgctcaaacaatggatcagctcattatttaccgcgtcattcagggaatcggcggaggtgcgctgatgccgatcgccttcacgatcatttttgatttatttccgccggaaaaacgcggaaaaatgtcgggcatgttcggtgccgttttcggcctttccagcgttctcgggccgcttttaggcgcgctcattaccgactccatcagctggcactgggtgttttatatcaacgtgccgatcggtattttatcattgtttttcattcttcgttattataaagaatcccttgaacacaagaagcagaaaatcgactgggccggcgcgattacgctggtggtttccattgtcggtctgatgttcgctcttgagctcggcggaaaaacgtatgattggaactccgttcagatcatcggtctgttcgctgtgttcgccgtgttctttatcgccttttttatcgtggaaagaaaagcggaagaaccgattatctcattttggatgtttaaaaaccgtttatttgccacggcacagattctggcgttcctttacggagccacatttgtgattttagcggtatttatcccgattttcgttcaggctgtgtacggcagcaccgcgacgagcgcgggctttattttgacaccgatgatgatcggttctgttatcggaagtatgatcggcggaattttccagacgaaagtgcggttccgtaatttgatgctgatttccgtggtcgctttctttatcggaatgctgctgctttccaatatgactccggatacggcgcgtacgatgctgacggtattcatgctgatctcaggattcggcgtcggcttcaacttctcactgctgccggctgcgtccatgaacgatctggagccgcgttaccgcggaagcgccaactcaacaaactcgtttttgagatcattcggtatgacgctcggtgtgacgattttcgggaccatccagacgaatgtgtttaccaacaagctcacagattcattcagcggcatgaaaggagcgggcggcgcgatgcagaacatcggaaatccgcaggagattttccaggccggcacgcgcgcccatattccgccgcacattctggatcgcattattgacgccatgtcgcaaagcatcacatatgtattcacgcttgcgctggcgccgatcgtcattgcggccgttaccattttgtttatgggaaaagcgagagtaaaaacctctcaggaaatggcgaaaaaagcgaattaaaaaaagcagtacatggcgtttgtcatgtactgcttttttgtttactccgcgaaatgcggagcgagaatgtctttcagcacgtttgcgctatggttgaattgacgctgttctgtttcattcagctcaagttccgtcacaccggcgatgccgttccgattgacgacagccggaatgccgataaagacgtcgtttacaccgtattgcccgtccagatatgtgctgacggttaaaatactgttttcattacgcaaaatcgcttttgtgatgcgggcgaggctcatcgccactccgtaatatgtcgcgccttttttctcgataatatggtaggcggcgtttttcacatcgtccacgatctgatccagctcgtcctgtttgtaagctgcatttttctccagcaattgctgcaccggcactccgccgatattggcgtgactccatacaggaagctcggtatcgccgtgctcgccgataatgtgggcgtgtacgttttgcggagcggcgccgaaatattcactcagcatataacggaatcgcgcagaatccagtgtcgtgccgctgccgatgacgcgttctttcggcagaccgctgaatgtccatgtcgcataagtgagaatgtcgaccgggtttgtggcaacgaggaagatgccgtcaaatccgcttgccattacttcaccgacaatgcttttaaaaatggcgagatttttttcgaccagctcaagtctcgtttcgcccggtttttgattggctccggcacagatgcatacgatatcggcatccttgcaatcttcatatgttccgtaagacgttttcaccggatgaggtgcaaatgcctttccgtgatttaaatccatgacatcgcccatggctttttctctatttacatcaatgatcacaagctcatctgtgatcccttggttaattaacgcaaatgcataactgcttccaacaaaacctgctccgattaatgctactttgttcactcgttcgttcatcatgtatgctcatcctccagtgtttcgtggtgtctgtttttaacttgtgaagtatttcacatttatattgtgcaacacttcacaaacttttgcaagagaaaagtttgatttttggacaaaaaatatcgatgatggtttccagattgttgacaacatcctaaaacggaaccgttttaggatgttgtatcttttcagcgtgattgaagacgtgctgtccttttcccagaagcgagggtttgccggcacgctgatgtgatgatagccctatccattaatgcggaagataaccgtttaaaccggagttgttatacaaaccattctgcacataatcaaatccgggctggttctgcccgggcacttgggcgctgccattgttaaaaatcactttggcattggccgtatccgcattcgcaggcagcgtcagcgtgtaaattccatttgcattcttagtcattgctttccccggccacgatccggttaattctatggccctgcctccatcatgtttgtaaatataagcatttacctggccccaatgatccggattttgatagccaatgatgttggtttgggcctggtcttttttgacaaacgtgtattcttgagttctctctgcaccctcgccgttcgttccggttaacctgatgttgtatgtcgtgccgattggatctcctttcccgatcgttaatcggtctccatccttaaatgctgtctgctgcccattattgatttggtaaacggcttttgctgttttcgcatttgcacgcagggtgaccgtcagctgatcattgaaagaatggactgcccccgtttggtaattctcaagaaagacatgaggcgcatttccaatatcatcagaataaagaacagccgcggatctggcattgatcgtacctgtcagtttgccgttcgctacttgaaatgaaccggcgccggccctattatcatacctgccgtcaggcaatttcgttgaagtattgacggtgacagaagacgatcccgcattagccagcacaacgccttttgagccgcgctgattcataaatatttgattgttcccattcggattcgagagttcctcaggctgcccggccattacattgtgaaattgattgaccgcagtgatcgcctgatctttaaataaggcgctcccgcgatctcctatttgactttttccgggaaatcgcaccccatttcctccgccctcaggtctggaaaagaaaagaggcgtgcttcctgagcgggaaccaatcactgcccagcctaaacggatatcgtcatcactcatccatgtggactcttcctcatcattggcatacgtatcatgtgattccacccatgtgaccaacttgtccgcagacacgtcagatgcataatgggagatattcgacacactcagattacggttctttaaagcggatctgatggaatgcccatagttagaagccgtcacattcatataattcgcataagcagtatctctggacgcgctgtcttgcaggatttctccgtattggaactccgccgatgtatttgtgatattcggccaaaatcggctgccgtaattcccatcatccggaagctctatatgcttggcggcatcatagcggaacccgtccgctccgtcattcaatgctctttccaagaaacgtttcagataggtttgcacctcagtattctgtgtattccaatcatacagcccaagcaatgaattttgagtgacgtcccacctgtccgaccaatttttaatttgtgtgtttccatgggtccagtttggaatacgcttaatctcgtcagaaatcgcggcgtaatcgctggtggtatgattgataaccgcatcaacaatgacttttacgccatatttttccgcggctgcacacatgtccttaaattcttgttcagtgcctaagtaacggttgccgatttggtacgatgtcggctgatacagccagtaccagttcctcatgcttttatctccttggttcccttcctttacttggttaatcggagacgtctgaatggctgcatagcccgcatcacgaatctctttcatattttgtgttaacgtattgaacgaccaattccaggcatgaaggatggtcccgtttttgaccgatgacgcggccacctcattcgatttgtttgcagtttcagcgtttgcagccgccgggcctgacaaaaccaaatgaaacagcaataaaaatccggcgaataacggcagtaaagaggttttgaatcgtttttcaaacatttttgacactccttatttcatttttgaagactgactgcggagtcaaaaattcctcttactctttcttcagctcctttcaactgttgtgaagactggagaattctgttaacgcttacatttcaacttatcacactctctctatcaaagcaacgcggcagagtgaattcaaatctatattcctatcaattaaaaagacttcccgctttcaaacaaaaaaagaaaccacctgtcaagatgatttcttttttatttcttttatcgctcttctgtaagacagcttcacaatgacataccgaagcagaaacagaatgcctccgcagacgataaaaagaaagatcattttcagccaagcaaagaatgtatggggaaaccccctgtcgtacatcgtaagcgccgccaccgcaaaagtgactgctattgaatctatccgctgctgcttcacccgctttttcagttcttctttggtgtctattctcggcatgagcattcccgacgctcccgccctgatgcaataataaacaattataatgaagaaaaccgccaagctcccggcccattccctaaacggacagttcagaacaagtccgcgtacgatgatgtcaagcaaagacagtgtgcccacaagcattccgacttctgaccaaatcattcgttctttctctttcacactctcactctttccattcacgtttgaaagtctgttccgacgctgattcatgacttcctcccgtactattaagaatggcttacaactcccattatatcttgccgattcataatgataaaccgaaatatcattgacaaaaatgttaataagggccccaattgatcaggacgcctatgcagataaacacaaggccgatgacaaaccaaatcagcgccagcggaatcatgaagcgaagccactttacgtacggaatgccgctggcagccagtacggccatcagaacgccggaagtcggattgacacagtttacgacgccttccccaagcatgaccgcttcaaccgcgacctgtctcgtgatgcccatcagatcggcaagcggcgccaaaatcggaataaatacgaccgcctcccctgagcccgatgatatcagaaaatgaagcagggcgctggaaatatacattccgattgcgcctgccatcgggctgaaaccgtgcagcagtgacgcaagtccattgactaccgtatcaagcagctttccgtgttccagaataacggaaatgcttctcgccattccgacgatcagcgcgccgtaaacgagcccctgacagcctgtaataaacgtttttgcgatatcatttgccgccattcccgcaatcaggcctgacacgattgagataaaaatgaacacggcggccatctctgaatcagaccagtcaagagtaagcgcgccgtataaaaagccggcaagcgacaaagccgcgacagccagaatcaatttatggcggacggtaaacgggactggcttgtcctccggatctgaagcctgcgggattgaacctgctgccggaaaccaatcgttccccagcagactggcgtcctttgcttttctgagccttctcgtataccgataaatatataaaatagatgatagcagaaaacaaatgtagacggcaatccgcaggccgatgccggaaaacagcggcagctccgcgatgctttgtgataacccgagcggtgaaggtgataaaatcgtcgcgttaaacccggcataacagccgatataaatgacggccgctccggccacggcatcccatttcagcgaacgggcgacgatcaggccgatcggaataaaaccgatcacggaattaacgacgatgccggttgtgccgaggatcgaaaatagagatccgacaattgcaataaacagcagctgtttggtgcggaacgtactgatgacattactgatcaatccattgatggcgcccgttttctccaaaatcgcaatggtgccgcccgtaaacaggattaaaaaaataatcggcgcggaacttgtcatcccttcctgaatcgcggtaaaaaaagcgatcgggctgacaggagactggtctaaagaatgataacttcccgggacggcggacgtcacactgccctttgtcaccctgtcaaattcccccgcaggaacgatgtatgatgctatcgcgcatagtaaagcgacaatgaacagcagcacataagcatcaggcatcacaaacaatttcttctttttcaatacaggttcggccttcggcacagccataacatcaccatcccgctttgaatttataaactattcagaaaatacagatatgtgctatattatatacagaccgattgcctgttttcaatatcaaaaataaaaaacagacagcttttgaaggaggacttacggcatgaacagactcacagagcatgaaaagcaagtcattatggacatttttgaccacctgcacgccaatcccgaagtaagctggaaagaatatcaaacaactgaatatctgactgaaaaactgaaagaggccggctgccgaatccgtacgtttgatgattgcaccggtgttgtcggcgaaatcggagaaggctcgcccgttgtggctgtccgggcggatattgacgcgctgtggcaggaagtggacggtgtctttcaggcgaaccattcatgcggacatgattcacatatgacgatggcgctcggcacgatgatgcttttaaagagtcagccgaagcttccgaagggcaccatccgctttatttttcagccggctgaagaaaaaggcggcggagcgctgaaaatgattgaaaaaggcgtactggatgatgttgacttcttatacggcgtgcacgtgcgccccgtacaggaaacggcaaacggccgatgcgcaccgtccattctgcatggctcaagccggcatatagaaggcctgattatcggagaagaagcccacggcgcgagaccgcatctcgggcttaacagtatcgaaatcgccgctcttctcgtccaaaaactcagcttcattcatcttgatcccggcatcccgcattccgtgaagatgacaaagcttcaggcaggcggagaaagttccaatatcattccgggaaaagcatcgttcagccttgatctccgcgcacaaaccaatgccgccatggagaaattaaccgccgaaaccgaaagagcctgtgaggcggcggctgccgcattcggcgcaaaaatcgaactgcaaaaagaacacagcctcccggcagccgagcgaaacaaggaggcggaagccatcatgacatctgcgatcagcagcattctcggagaagaacatgtggatgaacctcttgtgacaaccggaggagaggattttcacttttacgggttaaaggtgccgaacttgaaaacgacgatgctcggcctaggatgcggtctggagcctggacttcaccatccccaaatgacatttgaccgaagcgccatctttactggcgctgagatattaacggccgccgtcctcaaatcgtttgaagcataaaaaaaagcagcccgttacagggctgcttttcttcattacttcttcagatcttcaattgaattgacgtttttcatgtactgaggaacgaccagacccatcttgacgcctgtcagactcgttcctacatcttcatatttgcctttatatttagacgcatatgccttatgggtattcggaagccaagcagacaatgacgcatccgcgctgcctgtcgcaatcgcagtccacatcggtcctgcctccacttgcgtcagcttcacgtcatagccgaggtcttgaaatacttttccgattacattcgtacttgcgatttcactgtcccatgccacataagccaggttgattttatcccctttgactttatgggcgccttttgtccattgagccacttggtctttatgttttttcacatattcagctgcggctttggccggcttttcgccttcctcaacggcaatcatgacttctcccatatcgtcctgcgtccatttgaactggctgagaactttggccgcgttaggctgttccttactgaagccggttcttgtaatcgtatgaatctgctcggcagttccgtacgtttttttcggatcatcaaggaacttcagcttgtatctggagaacatccagtgcggcgtccagcccgttacgatgatcggctttttccggtcatatgatttcttcaatgtcgccgtcatggcggcacttgacgccgtgatgacattccagtctttcaatccgtaatccttcacggcctcatccgtcagggccatgatccccgatcccggatcgataccgataatggttttgttcacctggtccgcagccgttgccttatcatcagtctgcgaaccgcaggcagccaaagaaagagccagcgcagcggtaacgccgacaccgatgattttcttaagcatcaggcattccccctgctcttcttcttcactttaatgttttgcgtgatacggtcgagtgtaatcgctacgataacgatcgcgatacccgcttccactccgacaccggttttcaactgtgtcacggcgctgtatacttcagaaccgaggcccggcgcaccgaccatggccgcgataacgaccattgacaaagcaagcatgatgctttggttaataccggcaagaattgtttttgtggcaagcggaagctgcaccttgaacagacgctgagacgtcgttgaaccgaatgcttccgtcgcttcaatcagatcagccggaacctgtttaataccgagaactgtcatgcggatcgtcggaggcatcgcgaaaataacagatgccacaacgcctggcacaaccccgatattaaagaagaaaattgcaggcagcaggtatacgaaagccggcatggtctgcattaaatccagaatcggtgtgacaatgcggcggactgtttctttctgagacgcccatatgccgatcggaaccccgataataatggaaatcaaaacagatgtgacgacaagcgccaacgtttgcagcatcggcgaccaataacccaaataatcaataacaaggaatccgattaacgtaaagagtgcaattcctctcgtactgatccaccaagcgagagctgcaaaaataacagtcaataaaatagacgggatgaaacccaaaccgctcacaatcgcgtttacgaaagcggccaaaccgtttgagattccgtcaaagaaacctccgaacgtcatggtaagccagtcaacaaaccggtcaacgatatctgctaacggaattctaggcaatctgtccatttacttcaccccctgaacagaagaatcctgagcttgttcagcagaatcttcaacatttatataatcgttatttcctgaaagcgcgccgattaatgcgccttttacgacaatgcctttcatgcggtccttatcgtccgtgacggcgatcggaatattcgcatcagacacgacatcgaaaatttccgtcaagtatgtgctttcatgcacagtcgtaaattcagtatttaaaatatcctgaagcgataagtcggattccaccgcttttttcgcatccgccgcgtgaatgacgccgagaagctgtttctgtttatcaacggcgtaaatagaagaaataccgagattcttcatgagctgcagcgctacacgaggccctttgtcaatccgcacggtttcagcgcgcttcatgatgtggcccgctgtcagaactttggataagtcaacgtcctcaacgaatttctcaacgtattcattggacgggctcatcagaatttcttcaggcgtcccgatctgaacgatgttaccgtctttcatcagcacgattctgtcgccgatgcgcaatgcttcatcaagatcatgcgtgatgaagatgatcgtcttgccgacagagtcatgaaggtctaaaagctcatcctgcatgtctttgcggatcagcggatcaagcgcactgaaagcttcatccatcagaagaatgtcaggatcattcgtcaatgcgcgggcaagtccgacacgctgctgcattcctccgctgagctgatctgggaattggtgttcaaagccttcaagaccgacaagtttaagcgaatcaagcgctttttgctcacgctcttttttgtcgacgccttggagttccaacccgtattccgtattttcaagaatcgttctgtgcggaaacagcgcaaatttttgaaagaccatgctgatttttttccggcgcacttcccggagctggtcttttgacatatttgttatcatgtcaccatcaatataaatattcccggcagtcggttcaataagccggtttaacagccgaactaaagttgatttaccgctccccgatagacccatgatgacaaatatctccccatcatatacatcaaagtttgcttgattgacaccaacggttgatccggtcgctttcaggatctcttttttgttttttccgctggacagcatctgaatggctttttttgtctgttttccgaaaaccttagatacattttcgacttttatcttaattggtttctcatccaaattcatattttccctccataataagcaatctttaataccgtaacacgtttgtaataagtcaaacaaacatcataatcccgtttattttgtatcattactttaaaaacatccctgtgtcttattttcctctggtatgcttctaaatactctctaatcctccttattgaggataaattataaaggaaatcgggcttttatcaggcttgagaacgtttccatcgaatgtgctgcaaactgatttcctatcctttttttacaaatacaagaatttttttgcgacattgtcccggaaaaagaagttttcgcctcctgaaaataagggattttaaggaaaaatataggtctgccaacagacagctcactaaaaaaagcaccccaaaagggtgctcattgcgcaagctctgtctgtttcgtttcttttccgagaataataatggtgatgacggcaatcaggatggccgcacaaaagacagcgaaaatagctgtaaacgaaacgttccgtgctgcaagcgatccgacgagaagcggaccgaaaatgccgccgattctgccgacggccgcggttgttccggaaccggtcgcgcggatcgccgcagggtactgctccggtgtataggcgtaaagcacgccccatgcgccgagattgaaaaaggacagcagcatgccggccgtgagcagcatggccaatgaatccgcggcaccgaagaaataagcgctgcccgccgttccgagcaaatagatgactaagatggtcttccgccccgctttttcgatcagccacgccgctgagaaatatccgggaagctgggcaagcgtcatcagaaggacgtattcgaagctctcaatcatgctgtagcctttcatcagcatcacgctcggcagccataaaaacatgccgtaataagaaaagacgacgcagaaccaaacgacagacagcagcaccgtcggccggatatacggtttcgtccagacacttcccgcctgcccgcgtatgctttttttctgcgtcaatgcctgatgcgccggtgattccggaaggcttttccgcaagtacagcgcataaaacgcggccagcgccgttaagagcagtgcggcctgccagccgaatgacggtatgacaaagtaggaaatcaccgccgcaagaagccagcccgctgcccaaaagctctcaagcagcacgatgatccgtccccgcttttcgggagcggacgcttctgacacgagcgtcgaggcgacaggcagttccccgccaagccccattccgatcagaaaacgcaatatgagaaaaaccgtcaatcccgttgcaaaagcggatatgccgcttccgacagaaaagaataacagcgtgatcataaacacttttttccggccgatcctgtcggccagcattccgaataaaaaggcgcccgctgccataccgatggaattgacgcttccgatccatttcatttgatcgggtgttaaattccaatcagtgtgaagcgcggcgataataaacgataaaattccgacatccatcgcatcaaacagccagcccattccggcaatcgccagaagttttcgcggagtgacggcaggttgtttgttcataagcagcacctcaaatcgaaaatgattaccgtataagtttacacctgtctttacacattgtcattatcttttttcgcaaaaaaacccgcttgccgtaagcaagcggggtgcagattaattctttaagactgcgtttttaatattatcctgaagctgttgaatccgtttcgctccgtcttctctgatacgtctgttctcttcctcgatctgtttcgtttcctgcataccgctgacaatcgtattccaagacgtttcaatcgtctcaatgtcaatgctcggacggcctgccatacgggcaatctccacgctttggtttgaaatattttcagcgttgcgcttcagcatttcattcgtgcggcggtccagctcgctcattgaatcagccacaagcttttgccgtttgactgtgacagcctgaatgatgccgtttttgaaaatcggaatcgtaatgacgaaagcggaattgatttttccgatgagcttcgtatttccgcgctgaaggaggcggatctgcggcgctgtctgcagcgccaccatccgcgccatatctaaatcatagacacgttcctcaagcgcctgaagcccgtcacgcagcgtatcaagctgcatttgcgcaagctggtttccgccggccgctttttcttcataagaaggaatgagcgcctgcatttcctcaagcttcatctgcccggcgacaacatatttttcaagctccatgtagtagttaatgttgttttcatacatctcttcaagcgtatggttcgtctttgccatttcatctttgtattttgaaatttcgacgtggattttttcaatttctccgcccagggtgcggtacttttgaaaaatcttttcaatcatgctgttgccgcgtttgaacattttagcgagaaatccttttggttcatcgaaatcatttttgtcgaaacggtccatgatttttccgagctgcgtcagcattgtgcctgaatccgtgacacttgttgttttcatcatatttaagatgcggtcggagaacttcgagatttcaactgccggttcttttccgtactcaagcagctccatttggtttttcacgtcaatctgctgcgaaatgcgctgcacctcagggtcttggcgcagctgcgccctgatgtcatctgctttttgttcagaaatctcttcatttttatcaagaacaagcggattttgattttctgtcatatttatttactctccctgcttttgcgtaatggttctaaacagctttcttacgagtgacggctccttatattcctgccgaaacaccatgtcctccagccaatggacatcaaattggctttcttcaatataatgctcaatgtcctgatggcccggcggattatacaagatgatatcgacgccgaatttatttaaaaacaaaagagcggcggcatcagaacgtgtgagttcgccattttgttccgtatgatataaaacgagtttcggaacggtttgggcgtaatcaaacgtctgaatcaattgcagcagcgaagcgggcagattcgtcgcctggcggaacaaatagattgcggcatcccttgactgctccccgggcaaagccttcagccctgggtttctgcacatgtcagaaatcacattggcgatggcgctctgcacacctgaaggcagatgcttgtactgccagatgttgcttcttttcagcctgtccgcgtcaatctctcctttttcatttaaaacctgactgtagtgatactggtagttggctttcagctcttccgtaaacggaaaactgcggatcatgtgtgtctcctgatagtccgcggcggtatggagtctgttccaatattctttcgtatctttggaaacccccatcactttcgcaaaaaggttcggaacggccacccgctccctgtccgctttaaattgcggccggataaacgcccgctccttcgcaatgagaaataactcatcatacgtcgtttttaaggtcacggactgcggggtgtgctccctgaactgccaaggcttatacatcatggattcctcatggttcagcacatgctcaatttctttcgttgaccggtaggccgtcgtggacgttctgtccggcttttctttcggaaaaggctcaagaccgcctgttgcggggagctttatcacaaagctgagctcctcatccggatcaatcaagctgaacggatcttccgcagccggatgaaacaataggacatcacagccgatcagcatgagataatagagaaaatagagctggcttttggtcgcgtctccataccacaccaccttcggcatctcacactctatatcggcttgttcgagccatggattcaggtggttcagcgaaaactttgacacatccaagagcacacgccggaaatcgggatgattcagcccgttttcatgccggtccgcaaaggtttccaaaagcgtcataaacgcggtcctcagccggcggtgcataagcggatcagcgtgtttggcaagcagcctgcccccatcgagaaacgcgacaaacctggaaaccgaaagccctttctctttttgattgaccgaatgaatgtgctgcagcgcctgaaacgtttccggcgcgatggtcttatccagcgtctcgctcaacacatggatgttttcatgagaagacagctcgaaaagcttactgtaatactccgtctcatcataaggagtgcccaaaatccggccggcaagccgggtaaacgccagcccgttttcccgctcgtaaccgggacgttccggcagcggccgcatcagaaacgtttcccagtcatcgttttccggctcggcctttcggatcaccaattcttcctgcttcatcattttcctcctttctcttcatgataatcggtacaaaaaaggaaggaaatgaactctccctccttttttgttttattcttctttagatgcagccgtctgctcctgaacctgcttttgtttgttgaaatagtggataataaacgtgaccacaaatgcagcgatgatgattccgaagaacaccacgtgcggcatttcataatcaaaagcgctcgccgccattttcacggcgataatcccgatcagcacgaaagccgtgttttcaagctcagggattttatcaattaacacaaggaatacttttgcgactgtacgcatcatgagaatgccgagcataccgccgatcaagagcacccacactttttccgataccgcaaacgcggctaaaatgctgtcaacagagaaggccagatccattaactcaactgaaacgacagtggcccagaaaattccgaacgtacggaccatccatgaatttttcttcatgccttccgtatcgtcatcaccttctccgatccagaaatgcttaatgacgagccaagccaggtacagcgcgccaagcactttgatccaccagaacttaatgagcagcatcccgattccgataaagataaagcggaaaatatatgccccgaacaatccgtatgttaatgctttcttccgctgtttttcaggcagatgccttaccataaccgcaagcactaacgcattgtcggccgacagcagcccttccagcagaaccaaggaaccgatcagcccccatgatacagggtcagtcagcacctcaccccacattttccaatcaaaaaaggaagcgtaggtcgacataatatgatgtagaaaatccaagttttttcctcctatttagtaaaacggtaatttcctgcttacacctgcaagccgtaattccggcaaagtgatgccagaccgccggaaaacccgctgccgatggcgttaaacttccattcagccccatggcggtaaagctcacaaacgacaaccgccgtttcaatcgagaagtcttcccctaaatcgaaacgaagcagttcattctggctgttttcatcgacgacgcgcacgaacgcgttcgaaacttgtccgaaattttggccgcgcgcttccgcatcatgaatcgtgacggtgatgccgatcttttcaatatttgcgggtatttttgagaaatcgacgataatttgttcatcgtctccctctccctcgcccgtccggttgtctcccgtatggatgacgccgccgctcgggtgttccaggttattgtagaaaacaaaatcaagatcattaacacagttgtcatgggcatcgacaagaaaagccgacgcgtcaaggtcaaagtcatgccctccggagtacttgttcgtatcccagcctaagccgatcaccgcttttgtaagaccggggttcgtttttgtcagatcaacacgctgtcctttcgccaattgaatagccatgtgccgtctctcccttctgtgcttgatatggttttagccgatttgcaggccgtaatctgtcgcaatacgggccagtccgccttgatagcctgagccgatcgcggaaaatttccattcgccgttatgtctgtaaagctcccctgcgataatggctgtttcaattgagaaatcttcagccagatcgtagcggatcagctcttcatttgtctcttcattgacaatgcgaacgaacgcgttggaaacttgtccgaagttttggccgcgcgcttccgcttcatgaatcgtgatgacgaatgaaattttgtcaatagcggcaggcaccgcgctcaggttgacccttacactttcgtcatcgccctcgccctggcctgtaaggttgtcgcctgaatgtgcgacagagccgtttccgccttcaagctgattatagaaaataaaatcatcgggcgacgcgcatcttcctgcttcatttaatagaaagacgctggaatctaaatcaaaatcatgtccgccatcgtatttgtttgtatcccagccaaggccgacaacgactttagaaagacccggatttgttttagtcaaatctactttttgtccttttgccaatgaaattgccatgtgtgcactctcctttttatcgtttaggcgtatcggttaacgatatcgccgatttttgtatcgtttgtgccttctcctactgcggcgaatttccactcgccgtcctcgcggtagatttcagccgcgatcaggctcgttctgcctgaatagttatctcttaaattgtaagtcaccagttcttcgcgattagcctgatcaacgacgcggatgaacgcgttttgaatcatgccgaagtcctgttttcgtctgacgcagtcgtaaatattgacgacaaacacaagtttattaatctgagcgggcactttcgacaaatcgatgagaatttgttcatcatcaccgtcgccttcacccgtcaggttgtcacccgtatgtacgacaccgccgcaccggcttttcagattgccgaaatagatgacgtttttgctgtctgtcattttatcattttcaagcatcagtacggaagcgtcacagtcgatattggcaccgcctccgccgaacagctttccgaaaaagccgccggatgatacagggtcccagccgagtccgaccagcagttttgacaggccggcttttccttttgttaaatcaatccgctgtcctttttgtaaagagatcgccatatgattcactcctattctgtaagggtgccgctaagcacgccgcaagtgcgcatttttactaaattccgggacaagaatcccggtgtttattaagttatacgtcttttattatatcaaagtttcataaaacataagaatttttggcgaaaaacggcgaaaaattacttcctatattctccttcgttccggagagaatagagaaaacaaagaaattgacggggactgaacatttttcctatccttgtatcaatacatgtcaggaaaggggcagacgagtgattgatttaagcatacttgatcaggcgcccgtatccaaaggaaacgggccgcacgagacgctccgccgttcagcggagctcgcccgcctcagcgaaggatggggctataagcggtactggtttgccgagcatcacggcacaagagggctcgcaagcgtttcgccggaaattatgatcgctcataccgccgcagccacaacgtccatccgtgtcggatcaggcggcgtgctgctgccgcagtacagcccctataaagtcgcggaaactttccgtcagcttgaggcgctgcatccgaaccggattgaccttggggtcggacgctcaccgggcggcacgacgaaaatccggctcgccctcacagacggggtaaagaaaagtatgaccgagttcaacaggcagcttcaggatttatcatcctttctgacagattcggttccctcggaccatgcttatgccggaataaaaacagcgcctttgattgaaacagccccgcagctttgggtgctgggcctcggggaaaacagcgccagacgcgccgctcttcaaggtgcgggctatgtcttcggccatttcattaatccggaacgcggggtaaaagcctttcagatctatcgggaccatttccgggcctcctcccatttttccgctccggcctcactctgtgccattttcgtcatatgcgcagctacggatgagaaagcggaagaactcgccttaagccaggatttatggcttcttcgtgtcggaaaaggcgccgacagccgcgtgccgagtgtggaagaagcgaaggcttatccgtattcgccggaggaccgtaaacagattgcagaaaataggaagcggatggtgatcggctctgctgccgcagtgaaacgccgtctgcttgaactttccgaacgttatcagacaaaagagatgatggtgctgtgcaacgtctttgatttcgaagcaaaaaaagagtcatatgagcgtcttgctgatatatttctgtaaaaaaagccgtcaaacggcgcagcagatgagactgctgcaccgcttaacggcggttttttcgttcttttccttttttaaacgcattccaaatcccctgcagcataaagccgagcagaagcagaatgattaacagtaaagtgattgacggccccggaggcgttccgagctggtacgaagacgtcagccccatgaacacactgaaaagagaaataataatggccgccgcaaacacccatttaaaccctttggcgatacggattgcaaaagccgcgggcagtacgaggagcgcggaaacaagcagcacgccgataatcggaataatgaccgaaatcgccagccccgtcacgatgctgaatgacattgacaggagatttgtgttaatgcctgatgtcttcgccgtcgcctcgtcaaaggtaagcagatagagcggtctgtttaatataatgaaataaagcagaatcagcagggtaatgcctccgataatatagacctgctgctggctgaccgtgacaagcgatccaaataaatattgatcgatgctcatcgacgcgccgccttttgacaggctgatcagaaacatcgcaaacgacagcccggccgccattaagattgcgatggatacctctgaatatgtacggtatgcccgccgcatatattcgatgccgatcgctccgatcgtgacgacaacgatgctcgccgccgtaatattggtactgagaaaaaaaccgatggccacgcccgacaatgaaatatgagacagcgtatccgccatcagcgcctgtcttctcagcacgagatatacgcctaatatcggcgccataattccgatcatgcttcccgctagaaaagctcgtcgcatgaattccaagtcaaacatttccatccgcctttttcccccctctcaagccgtatgactttatccaaatactgctgtacttcattttgttcgtgtgtcaccatgacgacggtgcggttgtgatttttcacctgatgatgcataaattcgtagaaaccctgtctgctttcatagtcaaccgcggttgtcggttcatcaagcatcagcagatccggattgcttgcaagcattctcgcaatgcagattttctgcttctgtccgccggataaatcgccgattttccggtggcggaaatcccacatttccaccatcttcagcgcgttttccacctcgtggtgatccgtttcgttcaatcgtttaaaccattttcctttcgtataacggcctgattgcacaagctccagaactgtgcttgggaatcctgcgttaaatgaagaaatctgctgcggaacatagccgattgtcaggcgttttccggcagcgttttttttactgatctcggccgttccttcccaaggtctgagcatgccgagcatgactttcatcagcgtcgattttgacgcgccgttcggtcctgtaatgccgacgaattcgccgcttttgatttccagcgacacaccgtcaagcacgggtgtatgcgaataaccaaaaacgatatcctgtaatgtaacgagattcatgctgaccttcctttcccgcatagaaatagtgtgcaccccgcggcgcacactatgttatttaaccaatagcgaatctttcagtgcatcaaggtttttctccataatgtcgatataaccgatgcctttatcccgttctttttggcttaaaccttccagtgtattgagcacttccgttttcgcgccgatttcaccggcaagtgtatctgcaactttaggcgatgcaacttcttcaaaatagatgatcttcacatcatgctttttggcaaacgttttgagatccgccagtttggccgcactcggctcttcttcaggagaaaggcctgcaatcgcgacttgttttaagccgtattctttggcgagatagctgaatgccgcgtgctgtgtgatcaattcttttttcgacgctttatttaatgttgtacggtatagtttatcaagatcctgcagttttgcaatatattctttactatttttctcatagtatgctttattcttcgggtcctgttttacgatctgcgccgtaatggttttgacctctttttgcgcaagaaccgggctgagccacacgtgagggtccatgctgtggctgtggtcatgaccgccgtgtccatgttcctcttcctcttcatccgaaccttcgagcaagtcaattcctttcgacgcctttacaaacttcgcatgatcagagctcatgcttttttccgctgaaggaacccatgtctccatatattcgctgttgtatacgaaaagatcggcgttttgaatgccggcgatatccttcggcgtcggctcccaatcatggggttcgaccgaagacgggatgagaatgtctacatcgcctttgtctttgacaatttgtttcgtgaattcgtacataggataaaaggtcgtcacgacgtgcagtttgccgcttttcgaagaacctgacgaaccttttgaagatgaattgccgcagcccgccgcgattaaaaagcatgccgcaatgacaatgattccgctccattttttaaacaagccgtttccccctgttctgtaaatcagaatgatgacgatttccaaagcgtactttctcgttcatttgttacctataccataataaaacgaagtaattacgttttgcaagtaatttttttctaaattgataaccgatttacctaaaaagcccccgccatgtatggacggggcgtcgtatcacatatcaggcatgcagataaactcttgtttcgtaagggcggaacgtgatgcgggattccgctccgccgttattttcatagttgctgagaagcagctcggccctttcagattcggagccgtccggccaataaaaggcggcttcttctttcgatacgttgctgatggatatgattttttgtccgtttgcctgtctttcatacacaaacagctgcgggtcatcgggaaacagcagcgtgtagctgccttttatgatatcagcatactgttttcgcaggcggatcagttttttgtaaaagttcaatatagaattgggatcatcctgagcctcggccgcattgacggttttgtaattgggattgaccttcagccacggttcgccctccgtaaatccggcattcttgctgccgtcccactgcatcggtgtacgggcatgatcgcggcttttcgccataatggacgccatgacttcttccctgttgcggcccatttcaaatacccttttgtgatacatattgacggtctgaatatcttgatagtcctctattctgtcaaacggggcgtttgtcatgccgagttcttctccctgataaatgtacggcgtgcctttcatgaaataaagcagggcggcaagcattttggcggatgcctttcggtatttgccttcgtctccgaagcgggatacgatccggggctggtcatgattgcaccaatacagcgtattccagccttgatgttccagtttttcctgccagtctgtgagcactttcttcaaatcggacagctcaagcggttttacatcccaatgctcttggcccggcttttgatcaagctccatatgctgaaaatgaaaaatcatattcagttcatgctcatcggttcccgtgtaaaccagcccctcctcaggcgtcactgatccggcctcgccgaccgacatcacgtcatattttggaaaatacctctttcgtcatttcttttaagtaatcatgtatccgtgctccgtttggccggaaaggcttcggatctgcccggcgggcgatgtaatcttcatatggcggcaagtattctttttttgacagaagatgaagctggtctattcgcaatccgtccacgcctttatcgagccaaaatctcatcatctcgtatactgattgccgaacctcgggattttcccaattcagatcggcttgtttaacggcgttcatatgcaggtaatattcgcccgtatgttcttcgtactgccagacggattgtccgtaatccgacacccaatcggtcggcgggccctccgcggtgcccggccgccaaatataataatcgcggtatttgctgtccggattcatttccgcctctttgaaccaaggatgctccgtggaggtatgatttaaaacgaagtccatcacaagctttaatccgcggctgcggcattctgtaagcagatcgtgaaagtcctccatcgttccgtatgattccataatcgcttgatgatccgtcacatcgtagccgttatcgacgtttggcgacgggtaaatcgggcagatccatatcacatcggcgccaagctcttttatataatcgagacgcgcgataatcccccgcaggtcgcctatgccgtcgctgttcgtatcttggaagcttcgcggatagatttgatagacaacggcgtctttccaccagtcattcgccatcttgcggccctcctgttttttagagaaccatttcctgtatgccccttctctaaacaaaaaagagaaggtttcccctcctcttttatctttccagctgggacggataaagcgtcatgcctccgtctacgaaaagtgtcgttccggttacgtaactcgcttcttccgacaccatccatgcggcggccgcggcgacttcttccggttttccgaaggcgttcatcggaatttttttcagctgggcctgtttatgtgtttcatcttccagatccttattggactccgtggcgatcgtgccgggagcgatggcattcacccggatgcctttgtctgcgtaattgagcgccatcgtttccgtcatcattttgatcccgcctttggatgccgagtactgcacgttttcaggacgcggtatttgctgatgaacgctcgatatgtttaagaccgttccttttttgccgtgctcgagcatatgtttcagtgccgctttcgcccccaaaaaggtgccggtcacgttgacgtcgatgaccctttgccaatcctccaggctcatttcatggggcatcgcttccgctccgttaaagccggaattgttgaccatcacgtccacgcccccgaaatgctcctgcgcggcattaaacagcgcctgaatcccttcttctgaggatacatcggcttttacggtgacggctctgcctcccgctttctcaatgatatccgccgcttcttccgctccggcggaatcaccgaggtagttcacaaccacattcatccgctccttgccgaagcgttcggcaatggcttttccgattcctttcgaagaacctgttacaatcgctgttttcccctgtaaatcctgatacattgtctcatttcctccctgatgttaatacagagcatgtacccggttttaatcggctgaaaacaaaaggaatcataaaaagaacgatgaaaccgaagctccctcgttcttttttttattatgcgtagttgttcatttgcagccttttttgcacgccgacaagcctgctgaaaaaataagatgccgctttgtagttctcccgtttatgaaagaaatgagccgcgtcctgaagcagttcctctgtgtcagccaacagctcctttgattccaggatgtcaaaatactctttgagcgaatcctgtccgccttccccctgataaagctctttaatcagacggaatttcgtcatatagatctcatcttcccactccgccgcgcttctcatgccccgcgcgcagctggcggcggcttcactgtatttttccgttttaaagtagatatgcgtgagtgaaaaaacagcctggatgacctgccggaagctgtgtgcttcaaatccggcagccgcccgttcaaaatcctccgccgccttgcaaaagtcacccagactgtacatacagtgcccgatattataataggccgcagcaatcatatattgatcatcaagccgctccgcgtgctccaaggcgcattcgaggtattccagcgcttttttatgctgctgggcgtccatcagatttccggcaatgataaatttgcactgcacccttctcattccgtataattcatatttcttgtaaatatcaagcgcctgccccgcgtaattcatcgaaaagaaagtctgcttgatatgatagtacacctcagaaattttatacagaaactcggctttctctatgtcatcttccacatattcaagcttttcctcagcccgcttataatgagaaatcgctgagatgaagtttttctgcttaaattcatacattcctctgaaatagtaaaaataatattccagtaagccggtcagcttttgctggttcatctcaatctcagtgagcatttcagagaacggaggctggcagtcgccgtctttcatgggttttaatttatccagcatgatgcggtgcctaaattccatcaatgaaaaatacaacaataaatcctgattttcttccatatcttcgagttcatattgaatctcccgcttcagcgcttcagctttatcggcttcaaacgcgcggatcagcttataccattcattcatctttacggccacttcttcagatggaatcttggatttcatagatttgcctccttcctccggctactaattatgttatattttatcatagcaaatttatggcagtgagcaaacaaagattttaatcaattaaagaaagagagaattcaccatgaaactaccagtcagaatttcgctgcttctgatcctcttcttttccgcagacctatgtttttcctatgtgcagaaagaattgaggccgcagacggcattacaagatagagccattccaagcgctcttcatccgctcgtgaaacagaatgcggagctattgcggacggccgctctgaaaaaaggcatcaccgtcgttatcacagagggtttcagatcaattgaggaacaaaacgaattgtaccgtcaaggacgttcaaaaaaaggaaatatcgtcacctacgcaaaaggcggggaatcttaccacaattacggccttgcgatcgacttcgccctgcaaaaaaaggatggaagcctgatttgggatatgacgtacgacggaaaccgaaacggcacgcccgattggcttgaggtcgtatcgattgccaaaacgctcggttttgattggggaggcgattggagaggctttaaagattatcctcatttacaaatgatccctggctaataaaaccttttcttttttcgcttctgcgcatcaatgtacggaggatagacaggcctgtacacaagcttatatccttcattgccggacggcgtaaaatcgcgctgccactccagccgcagatggaaatcggataaaaaagcggcctttgcttcttcgggagtaacggccggcaccggattgatcttctccagctgctccgggtcaatgtcaggcgccatataagcttccacaagccccgttacgggactgacaagtattctcgcagcgccgaaccgcagcggaatatcctgatgccatacggaaaaatggaagcggaacctgccccttccgtccgttttcagcgggttcattttaaaaaactcgtccgctctcggataaagcttgtataaaaattgaagcgcgacggcctcacactcttccgcagaataaaaggccgggccctgatgctcaataaaagatttaaaggctgtcattttccctgtctttttgtccgttttcatcttcattgtatttttgttgctggtttcaaaatagctttcgatactcaaatctttccgttccggaaccgaccctttccgccatgtcgttccgatctcatccccgagatcgcgccggcgcgtctgaaccatatccgaggtaaaccccatcaattcatccaggctgatttcccgtttatgttcaaacgcaggaagcggttttgccggctcattcctgtcttcgcaaagctgctgatccggcacgatatcatcttcaccggccggatagctgtaagccggcagaatcggttcatagacgagacgcggtatgttctcaaaattgaccacatcatagacgagactgaatgtcagcacactcatataatgcgagacgactttttcccgatcgacgaatgtttccgggacgggcgcttcacccttatccccgtaatagataaactgcacgacgaagccgctcctggttacatcaacgaaaaaacctgaatcgggaagcggccggccgagcactttttttgtatagataaatcggatgcacccattgcgttcttccctcgcctgaaagatgaaattcataaaagtaagcgggcggtgtctcgccgcaaaccgaagagccgtcagctttaattcggcgtctgacagctgcatgtctgaacccggacagtcgttgcgtgaataggtaagcaaagatccgtcgtcgcccagctcaatcgttaccgttttatccggatggttacgatctttccatatataataggctctcgttttttgtttttcatcataatcttctatttcaagctcatagtgcggcggtatgttcccgatctccagcgctttttttctcagatgttctttcagcaatggggtcatcctttcagaagagtgtataaaaaagaactgtttttaattatataaaaacgtccttatccttttaaagggaagaaagtgccttttatgtgtctatttttagcaaagagggaaaagagccgtattcagagcggctgtttttcatacaatagtcacaattcccgcaaaagacccgggacgaacgcccatgaccttcagcctattaaactcgtgatcacttctcccgtatgggcctcaataaaccgcgggaaaaccggcttgtatacgagcctgtacacttttccgcagctgccgtcatcgtaacaacgatcccaagcgagctcggctttgatggcccggcggatcgcgtccttcgcctcttccattgtcaatgaaggaacgggatcgatttcctccagctctttcggatcaatttccggcggcatataaaacgtgacaagacccgtctttttgctgacgcagattctcccctctccgaatcgcaaatcaacgccgcccgaacaagccttatatgtaagtcccacgttttctccttcatcatccggctcatcatattgaacccggaaatactgatccgcttccggaaacatggcgaataaaaagcggatggccatgtgatggcattcttcctcggaaaactccggttcgccttcactatgtataaatgacatcactccggcgagccggcccgattctttatcatgcattgttttcaatacatgttcattccgttctttaaacagactttctaagcttttatctttccggacggattttgttttttcaggacgccatgcaatgccgatgcggccgtctccaagatcagtttccctctctttataaaaaccgtcgtgcagcccgatcatgtcattgatgctcatcttttccgcttcaggtgcagggcgtgaaatcgggacatacggcagcatgtcgtcttccagcccttcatattcgtctatttctgcattctcttccttcaggtcagccgatatcggccgcgtcggagacacgatttcatagacgagatgaggcttgtcatccccctgcacatagacggactgatgcagtacggtgaacaacagctccgcttcaatatgtttgacaaagtgagccaatgcttcccgcttgtccgcaattgttccgggtcttaagagattatcagccttcccatggtaagaaaagccggttacttcccctgtcaaagacaggtcggcgtaaaacccggtcagcggaagcggcagaccgtcagccatctgaacataggaatatctcacatcaccatcatttgcggagccgctgttttccaattcgaactcagccaatgcccccggacgatgggtttctacaaacgcccgcatccgttcttctatgtccgattccgaaagagccggcagatcagtccggaaagccggacgggataaggatttcagttttccgtcccggtccaattcgaccatgatgccggcttccggatcattcttatcttcccaccaaaacaaaacctcatcttcttggtattcttccacattactttcgtagcgggcaggtacgttaccgatccggagagccagctgtttcaattcttcttttttcatcataacacttccttttcttccaaaaagattgatgattaccaagactcttttatacaaaactagtataattaacctgtctgtcttcatgactattgaattaatcattataacaacagggggtaaaccagatgtccatcaaaaaaatgagcgccgtgtttttcatactgcttctcacggcatttaccgccgcatgcagcagcgaaacgagcggcggccaggaaagcagcacggcgaaagtgaaaataaaagagacggcatgggccgcttcagacgatactgaacatccggccgcgctgaaagtaacggtcaccgtcaaaaatacgggcaaagacccgcttaccgtcaaaagcagcgacttctcgctttatcaggatgacgcgaaaacagcggcggccgataaggatgaccagatgcagagcggcacgcttcatgcgggcaagacagtgacgggcaatctgtacttcacggctgacgaaggcaaatcatatgaattggtatatcagccgcaggcaaaagacgcgaagcctttatcttataaactgaaagtcaaaggcacagcctcaaacgcaaaacctgacccggcggacgcattatccgcatacattgatgtgatgctgtacggcaagcacaataaagatttcacccgcctgaccggtgtaaatgaaaaaatgacggccgccgcatatcaggaatcggcgaaagccagctttatcgcttctgcaggcatttcacaagaacaggcggattcaaaagccatttccgctattattgacgccatgtcatcagcgcttcgggataacacagagctcaaggtgcataccaaatccatgtcaggcaaaaaagccgtccttgaagcaaaagtgacgccgcttgatatgtctccgctcgcgggccagctgcaagaccgcgtgcaagactatgccggaaagcaccccgatgctgatgaaaacgaaattgtcagccacctgctttctgtctatccggaagagtttatgcgcctgaaaccggcttcttcttccgtaacaagagaaatcgagatgaagaaaaacgcccgcggccagtggtatctggatacagacgccgatctggaaggattgacagaagcgtttttgaaaacgtcctgacagcaagaaaggaaatagcgcaggctatttcctttttttattttcacttgaagatgtcactgatatattgaacctcatcctcggtcaattgcacatcaagcgcgcccagattgtgtttcagctggccggggcgtttggctccgggaatgatcgcatccaccgccggctgcgacagaagccacgcgagtgcgatatgcgctgtctgcgcccctttttcttccgcaacggcccgaagcttatccactcgctccaggttttggtgaaaagcttctccctgaaacggcggcctgttttttcggctgtcctcaaagactgtgtcttttgtaaactttcccgtcagcaagccggaagcaagcggaaaataaggaataaaagaaataccgttcttttcacaataaggcagcagatcatgctccgcctcacgctgaatcagtgaatattctgattgaaaaacctctaaataaccgtcggcgttaaactcctgcaattgcccgaagctgagattggacgcgccgattgctctgattttcccttcgtccttcagttcttttagcgtgcccgccacttcggagagcggtgttttgccgtcagggaagtggacgtaatacaaatcaatcacgtctgttttcagccgcttcaggctgttttccgcctcactacggagaaattcacggctgttgtccagctcgatttgtccgttgacctctttgtgcgcgccttttgacgcaatcacgaggctgtcccgcacgccgcgctctgcgacaacttcaccgattaactcttcggaacgccccaaaccgtatataaacgccgtatcaataaaattgacgccgccgtccaacgctgtgcggatgagttcttttcccgtttcatcattaagattcggaaacagattatgtcctccgaccgcattagcgccaaagccgatacgctttacccgtaaatccgtcctgcccagcgtacgtgtctcatccatggctcaggctcccttccttttatcgctctgtttagtattagataactggtaagaattatcctgccccgagagcatttctgcagaaaaaaccttgaaaagcatgtgcccttcaaggttttttggctgtgtattaagatgtcagagctgcggcgaagcgttcggcttcatctgtgagagcaccttcgatttccttatagcggctggaaatcgttgaggcgctgacgccgtacttcttcgccagcttggcttgagaaacggacgcgccgttcagagaaatactgtttacgtaatattcaaccgccgccgcgaaagcttccggctttctgatcgtcggtgtttttttgacacagaacgttttccacaggtcaataacggccggaaccagctcagccgggtattcatccccgctcaggcctttttcaatggcgtccgccgtttccttctccatgtcgttcgcccactccgtctgtttttcttcagcagcctgctcaggctcttccgccgttcctaaaagagcggccagcacagtgtcgaagtcctcctgcataaagcgctcaggcgattttccttccgcaagggccggggcagccgcctttttcactttgctgattagagcttcggtccgcttcacagggaagatcgtaaactgcataaagaactccgctttttccgcttcgtggatcggatagccgagaatcaggcttcccgccggcggaagatcctgctggctgacgtccatttccactttgaattgtttcttggtcatcacatcttcaaagtgaatcattccttctttcacatcttcaagcaccataaccgctggtgtcatgcttttccatgattcaacgatttcccgtgttttcggacggttgatgccgccggcttttttctgaagatattcttcaaaaatcgtcttgccgcctgccagcggacggaagaaaattccccagataccgaggttgaagactccgatgtctttagtctgtctgtccagctccgtaatgaactcatgctggttaataaatgatgatatgccgtctctatgtgctgtaaaggcgtactccattaagctttcctgaatctgtttcgcttcttttgccgcgatgtctgccggaatggcagcttctttgcttccgcagcattttttatatttcttcccgctgccgcatgggcaaggggcatttcttttcacttttcccacaataaaccctccgaattctgatataactttattattttaacaaaaataacttcagagggcttggtttacggcgaaaaaagaatatggaagaaaaaaaggccccgggatattctcattctccggggctttgaaactgttaatttgtattttgtccgccgccgttcagaccttctttaatcagcccgtttacttggctgttcatcaaaagtccgatgtgtccgacaccgtgaatctgcacgtttttcccgccgatcagtcgtgacagcgggttcagaacgatcaagtccgctgagctgtaaatcgatgtatataaaatcttttggttcggatcagtccccggaagcgcccggttggtcacaaggccgttcgctccgccgagtgtgacgacgttggcgattttgtctccgccgtcaagatttttaatgtaatagagcgtgttggcgccgcccatgctgtgcgcgacgatatcgacttttttcgcacctgtttcgctgagcacttttttcacgtaattggacagtctcggcgcattgtgtctgttgtttccggttttgtctaagaaatcaatagcgtacatctcttttcttgaccagccttgggatgccaagtatgttttgattcccgcaaagttaaaagacgccccgccgattccgtgaaccatgactacagggttatgccctgaggaggctttcgatacggtcggctggaaggcaaatacggaaatgacggacagcatacaaactgtaaggatgactaggattttgctttttatatgtttcatgaactttcctcctgctatgtaatatttttgcagttttcattctattagagaagaaaaggaaaaaatagtgtattttttactgttttcaacaattaaaaaagagcggaaaaatgagaaagacgcccctttcccgaaagcacgcttatgctttaatacggcataccgacaaaggagagaacacccggttctctactcctagtactcattgaaataggtttgaatccgcttaggatcttgcgtttttgtcagcgcgagcatgagaagaatccgcgctttttgagggttgagagagtttgaagctgtcaaatggtctttttcatactctcgattaggtgttaccgccccgtttcccgtccttgtggagcggacgaccgccagcccgcttttgaccgactttacagcgccttttagcgccgcatcagacattgagccgtttcccgggcctgcaaaaataatgccttgcgcccctgattttacggcggcttcaaagagatagcttccgtcattttgatagccgtatataatatcgacctgcggcagtttatcaagtttatctatcttgaaatctgtatccttcgtatgctttcgggtgatgatgttattaaaatagacgtcatcagcaattgttccgatataacccatttcttccgatttgaaagtgtcggtcgcggttgtattggtttttgtcacataacgcgccgaagcgattctgtcatttaatacgacaagcgtccccttgcctttcgcctcaggcgcagccgctgtttttaccgcgttatataagttggacggcccgtccgctccgatcgccgtggacggccgcattgacccggcgacaacaacgggtttgtcactcttgaccgtcagattgagaaagtaggcggtttcctcaagtgtgtctgttccatgtgtaatgacaatgccgtctgtatcatcagacttgagcagcttgtttacccgttttgcaagtttcagcagtgtctcgttattcatattctggctgccgatattcacaacctgttctccgctcacatgcgcggcctcttttatctccggaacggcctgaatcagggcatcaactccgattgcccccgccctgtactccgtagcggacgtctttgaaggagcagcgcctgcaattgtgccgccggtggcaagaattttaatattcggaagtccgtcttttttcgcagaggctgcggctgccatctggggcggtgtttctttcgtttgaggagattgggagcagccggccgcgatgaagagcagagccgtgataaatgtaatgaagggcatgaattgttttttcattcttttctctccttttctttatttatgatgattttcctctcaccggtcaacgcgcttgtcaggcattcttccgaagaaaataaccgttaaaaaaccttgacaccgtcatgcgaaatcaagataatagaccagtcactatattttaaatttgtcacaaatcagtaaggtgggaacattatgagctatggagattctcgggaaaaaatcctcgccgcggcaaccaggctgtttcagcttcaggggtattacggcacgggactgaatcagattattaaagaaagcggggcgccgaaaggttctctttactatcattttccggacggcaaagagcagctcgccattgaggctgtcaatgaaatgagccattatatccgtatgaaaataaaagaaagccttgatgctcatcttgatccggcggaaagcattcaagcgtttttacaggacttatcaagccaattcacatgtccggagaattttgaagggtttcctgtcggtttactggctgccgagactgctttaaagagcgaaaagctccggcaggcctgtcaaaacgcttatcaggaatgggagaatctgttcgcgggcaaattaagatcagccggtttttctgatgagaaagcggcggaaatcagcactgttttaaatgccatgatagaaggcggcatcattgtgtccttagccaaaaaagacaaaatgccgatcctccatatttctaaacaaatccccaacctgctgaagacataaaatacgagagacatgtacgtatagaaagagaggagaatgattttggaaaacgctcagccttccaaacaatataaagtcatgccgatcatgatttctttgctgacggcagggtttatcggcatgttcagtgaaacggcgctgaatatcgccttgactgatctgatgaaggagctacatatcactcctgcgaccgtccagtggctgacgacgggctatctgctcgttctcggtattcttgtgccggtatcgggtctgcttttgcaatggtttacgacgagacagctgttcatcgtttcactcgctttttccattatcggcacgctgattgcagcgcttgcgccgagctttccgtttcttttggcggcaagaatcgtgcaggctttaggaaccgggctgctgctgccgctgatgtttaatacaatcctcgtcatcttcccgccgcataagcgcggagcggcgatggggacgatcgggcttgtcattatgttcgctcctgcgatcggtccgacattttcagggcttgtgctagagcatttgaactggcattggattttctggatttccctgccgtttcttgtgttggctcttttattcggcatcgcctacatgcagaacgtgtctgacattacaaaaccgaaaattgacgtgctttccattattctgtctacgatcgggttcggcggcatcgtattcggattcagcaatgcaggcgaaggatcagacggctggtcaagcccgacggttatcggttcgctcactgtcggcgcgatcgcgctcatcttattttccatcaggcagctgacaatgaagcagccgatgatgaatctgcgcgctttccgctatccgatgtttgttctcggtgtcgtgattgtgtttatctgtatgatggttatcttatcgacaatgctcctattgcctatgtatttacaaagcggactgatgctgacggcgtttacgtccgggctcatcctgctgccgggcggtattttaaacggctttatgtctccggtgacggggcgtctgtttgataaatacgggccgaagtggcttgtcattcccgggtttgtcatcacggcaactgtgctttcgtttttctcaaacattaacggcgcttctacggcgcttctgattgtcgcgcttcatacatgcctgatgatcggcatttccatgatcatgatgccggcgcaaacgaacggcttaaatcagctgccgccggaattttacccggacggaacagccattatgaatacgctccagcagatggccggcgcaatcggcactgcggtggcggtcagcatcatggctgccggccagaagaattatatgagcaccgcgaaaaacccgaatgatccttccgcatactctcacgcgctgattgcgggcgtccagcacgcctttatctttgcgatgattgtcgccgttatcggcttgatcagcgctttctttatgaaacgggtcaaagtgaatcattcataagaaaacagcagactccccgtgagtctgctgtttttttatataccgcgcgcttcagccagttcatcaatcgcatagatcagatcgtcagctgtgttatagaaatgaggcgccagccggatgatttgtccgctggatgcgcatacgatgtttttccgcctcaacagcgcagccgtttccgccgctttttcatcccgtatggaaatcatgccgggtctgtcatcggcagacggcggccctgtgagattcagtcctttttcagaagcgtattcatacgcaaatgcgctgagtttttttacttcttggtgaatgcggtctgtgccggcatcgtttaatagagataaagccgcctgtgccgcatatatgctgataaatgccggggttccggtctcaaagcgtttggctccgtccgcataagaaaaacgggttaaatccggcatcgacgcccgctgctgcccgaaccatccggtgactttcggcttcagccgttcggcaagttcctttctgacataaagaaacgccgttcccggtatgccgagcatatactttctcgcacccgcggccagcatatcaactccccattcttttacatcaatcgggatgtgccccgccgattgataagcatcgacaaaaagaagcgatcccttctttgcggatatctcggcaatgcgctttatatcctggacaaaacccgacgtatatgacacatggggcacacaggtgaaaagcgtctgctccgatatgtacgtctcataccgctctaacgggatcattccatcttcagacggcacgactgaaagctccatctcagtctgtgccttcaaaatgtgggcgatcgccggaaaatccaattccgtatacaccgcctgtttctttcggcaatccggtaaagcagaaacgacggcagagacagcagccgttactgaaggtaaaacggcgatttcttcaggatgggcgccgatcaattttgcaaattcacaccttgcctgctccgtacgtccaatggcttcttcccagtttccgccatgctgaaacaggctttcctgatagtcattgaccgcttttgaaaccggcagggcaagagcgctttgagagcagctggcgagcatcgtatgtgtgcggagcaccggaaataaagatcggtattgcaccagaggcgaattcaagacatggttcccccttcggcaggaatatatgtccattatagagtatggtaaaaagaaaaggagggttttatatggagaaaaaagtattactgacaggctttgaccccttcggcggggaaacggtcaatccttcatgggaagcggtcaaacggctggacggttcccatgaaggccctgcctctatcgtatccgaacaagtgccgaccgttttttataagtctcttgccgtgctgcgcgaagcggtcaaaaagcatcagcctgacattatcatttgtgtcggacaggcaggcggcagaatgcagatcacgccggaacgggtcgcgatcaatctgaatgaggcgcgcataccggataacgaaggaaaccagcctgtcggggaaaacatttctcaaagcggtcccgcggcctattggaccggccttccgatcaaacggatcgttgaggaaatcaaaaaggaaggcattcccgcggctgtatcctacacggcggggacgtttgtatgcaatcatctcttttacgggctgatggatgaaatcgcctgccatcatccgcacatccgcggcgggtttatacacatcccgtacattccggagcaaaccttgcagaagtctgcgccgagcctcagcctggatctcgtgacaaaagcgctcaaaatcgccgcggtgaccgccgcggcgcatgaggacgatattgagaccggcggaggcgagcttcactaagcggcagacacctcggcccatttcttccggtaaacgatgcgggacagcgtcacactgatttcatagaggacgagcagcggaatcatgacgagaaagtcagacataaaatccggaggcgtaatcagcaccgagacgacgatcagcaaaaaatacgaaagcttccgcgcctttgccagccgggttggattcacgattccgagccgtgtcagaaacatgacggccagaggcatttcaaacaaaaatccgaacggcaatgtaagattcagcataaaggtaaaatacttgtccgccgtaaataccatgtcaaaatggccggcggataattgtgttaaaaatccgagcacaatcggaaacagcacaaaatacccgaaggaaattccgataataaacaaaagcgaaagccccggaatgtaaagcaaagcggcgcggcgttcgaacggggtcaaagccggcgccgtaaaacgccagagctgaaaggccgcaaccggaatcgctgccgtaagggcgcatattcccgcaatcatcatatacacccataaaatctcgctcggccctaaaacggccagcctgccatgcaaatccttgatcagccagtcataaatatcctgcacaaaccagcaggcgccgataaaaaacacgagaaaggcgataacgattttaatgagacgctgccggacttcctctaaatgcccgatcaagtgggtttcttttttatccaatcgtacatcctccttatagagaaagaggcagaagcggattcgtctgcccccatgtcaggattcagcctgccgttttgtctttctcagccgtctgcttgtccggctcttcatttgagaccaatgtttttgcggcgcttttaaattcaagcagcgtgcggccggcggcacggccgatttccggaagttttgaaggtccgaaaatgatgagagcgatgacgaaaatcaggatcaacccgggaatgccgatatttgaaaacatgagtgtgcctccttattgtgagattttggcccgtttctttctcatttgcttttcatgcgcattgttatgggcgaagaaacgatcctcttccacctcgtttgactgctttaaaccgcctgcaaccgccgcttgagagaccttccgaatccccgtctggtctttctgataaatgaatgaagcccgcgtggatacctcagcccccggctccgtcacgtacggcaccactctgtaatccgctctccattgggcaggagtcaccgtacagcggacatagccgcggtaatcgttgaaaaacttaatatgcgggttttgttttaagatctgatccgtatcggcccgtttatccgccccgtttcctccagatgtaatggaagtcccgacgaattcggctccgaaaatttttgaattcgtttgattaaaatcggtatgcaggtttgacgcccagcttgcatgaacatcacccgtcagcacgatgacattgttcaggtttttgctttttataaaattgatgacccgctcccgctgagccgggtagccgtcccatgaatccatgctgtatatcggattggcggttgttccgaaattccattgcgcgaaaaagatttgctgcgccagcacattccacttcgcttttgaggcggctaaatttccgaagagccattgctcctgctctgtccccatcaatgtgcgcttcgggtctctccactcatcagaaggcggcttattcccgtcgccgttggcctgatcatctctgtactgtcttgtatcaagcacattgaacgatgctaaattgccataagaaaattgcctgtacagccgcatatcaggaccgttcggcaatgacatgcgcctgagcggcatgtgttcataataagcctgataagctgcggccctcctgagcacaaacgcttcaacggattggcctttttcagggataacattggcataattgttttccacctcatgatcgtcccacgtcacgacccacggaaatgcggcgtgggcggctttcagattggcatcagagcggtattgggcgtgacggttgcggtaatctgacagtgtgtacacttcggcgctgctgtgcgtcctgacatttcccgtttttgacacatattcgttcggtccgtattcataaatgtaatctccgagatggaatacgagatcaagcttttccttcgccatatgtttatacgccgtataatagccgtgttcatactgctggcatgaggcaaatgcaaacgtcatggccgatacgtcagcgccgggagcgggcagcgttttcgtccggccgacggggctgagctcatgcccgcttttaaaccggtaatagtacactttattgggcttgagcccgtccgcctcgacatggacggagtgtccgagattcggcttggccatttccgttccgcgtttgacgatgtgacggaaatgttcatctgcggcgatttcccattttaccggcacggcctgcttcggcatgccgcccccattcagcgggtcaggggcaagacgcgtccagagaatgacgctgtcagacagcgggtcgccggaagctacgccgagggtgaacggatagtttgaaaatttcggagcggcattcacttcaaacgcgccgatggattgcgcgatcgctaacccgagggaaagaccggcgattttcccggcgccctgtataaatgcgcggcggtcaaacgtattgttctgaaagcttttgttctccaattccttgatccattcatctaaacggccgtcatgtgtcatgtcagttcccctttcgtcttattgatcgcccttattataaaaaagaaatgttaaaccgctatgaagaagtgtgaagggtttgtaaggctgaaaaatgaacggcgggagacatttttcacattgtttcgacaaaccttgccccgccggaagaaaaccccctctgtttctttttggcttgtcatccgtcaagcgcacttttttcctatttttcttcacaaaacattaaaaaaacaccgttcattttaagaacggtgcccccgggattaaaatgtattgtacacgttttcgcacgtctcacctgtcggctgatagaagcagtgggatctgaatctggcgacaaacggctggccataccaagtctgcgggcagttgcccggcggcttaaagtaccacagactgaacttagccggccaaaaccgttctccgttaatgttcctgcgggcaagcctccgctcggattcacgcggtctctggtaaaagtatccgtgagtcaccgcttcaaacgcgtgcggctgaaacaccatctgcctgatggtgcgcaggcctttaaaatcagaacaattcgcccgcacccgattgattcccacattgccgaccaaaagcattccctgcttcccttcgccttccgcttccgccctgagcagccttgccattagatcgacatcggcgctcgacgcttttacgactgccatcatgacacctcccgtattttctcctttcatcatattcagcagcggcccagtgatgacagccaaaagccagaaaacaaatgttcacgaaaaaagggtttatatttcacgttatgaggaaacatactaacatgatttccataaggaggaattcgaatggaacacattaaagcgcttgccattaaaggcattatgaccatcattattctgtatctgatactcggcttaggttttcgctttacattcggtgacgtgctgctgatgaccattgtgctgggagccgtttcctactttacgggcgacctgtacgtgcttccgagatggaataatatcacggcggcgtccgctgatttcggaatcgcgtttcttgttgtctggctgatgggaatgccgctgtccatgggcatttccggaggaagactggcgtttgccgctctcatttccgccgtcatcatcgccgtcggagaatattttttccatatctatctgatgagaaaagacttgggagggtcccgttttttagaaccccggtccgaataatgtaaaaaaggccggataacggccttcagcttgtagagaaaatgatgttttttctgcaagcttttttgttttttgctgtttctttacatatgcccagccttgcttggctgggtatgcggcaaccttcaacatcattttgaataagatcagcggatcaagtgaggggcggcctttattttcgttgcagtaaggtttgaccttttcaacgataaaagagaagtctatgtactgatcaatttttcgaagcaggtgatcctcttcaacgagttggtcaaacagaacgaattcggctgtattttgagaagcgtctcttgtgcgggtcttttattatatgacaggggaatggatattttaagggaaaaataaaggctgtcgagattttctagacagcctgagccccttaaagggggctttttatttgtaaagtaacgctttatacatcttgatataactgataaacccttttcagccttttttcgagctgttcaaaatgaacaaagcgggcttctctcagaaactcagtcccatcaatgaacaaaagaagcacggggacagtgaagactgaaaatctgccggcaacctcttctacctcgtcagcgttggtatgccccaatttgatattcggaaactgatccaaaacttttctgagctgcggcagaacagcgtgacatactgtacaggcaggtcttgaaatgtagataaaactgaattgatgctgcttaataaaattctcgatagaatctaatgaatgtaagtctgtcagctctttcatcaaaaccctccttcaaatcggctcgtctttcatgaccaagctcatcaatactcgtacattcactatacacatttatattgatcatatccgcttttttgcgattcagagcaccttaacgtcgtgcttgaaaaataaaagaacagttaccgcttttcagtaactgttcttagatacttatattaaaaatgcaaagcgtaagctcctgaaccgatgagtgcaactccgatggagactgcaatcagcaccacgttatattcaaaaccgccggcaccgttcgcaaaccctttcgctccatgaacttttacaatggcacctaacataatgatcgttatgatagcagctccaagcgggaggaatacacctaaaataaataaaattccgcttgcgagttccccgagacctgataaagcggccgcggcattgcctggtttaactccaattgactcgaaccattgtccggttcctttaatcccgtatccgccaaaccagccgaataatttttgtgatccataaaacagaaacaccacaccaatcatgattcgaataagtaatagtcctgcatcttccatttttatctctcctcatctttgatttcatctgattctttgctggacggtaccatccagcaatcatcaattgactatatgtttctttattttttatgtgtcaaatcaatctaattctcttacttcaaacggcagcagcccttgttcaatttgtgcccggtgcggttcatactgctcagggagcatcaattttccgcccattgtttcttgtgactcatcatgggcaaagcccggcggatcagttgcgatctcaaataagatttccccatgttctctgaagtaaaccgcattaaaatagtttctatcctgaacaggagtcacaccatatccgtgcgcagcaatgaatctttgccaatctaattgatcttcgtcatcctgagcccgccaagcgatgtgatgcactgtgccgacacccatttgtccgcggccgatcggcgttaatttaagatcaatcacattcccgatatcaccggcagaacgataacgaacgaagtctccttccttgccgactcgctcaagccccatgatgttttccagcagttcacctgttttttcaggctgtgctgataacagggttgcaccgccaaagcctttaatggcaacatccggggttacatctccgaaagtccacgtattggcctcccctgcttctctttccacgatttctaaatgcaggccatgcgggtcatcaaattctatatattgttccccaaaacgctcgatttttgtgtatggcacgttgaacttttcaagtctcttttcccaaaacgccatagcacctctcggcacgacgtaagatgtcacgccaacctgtccgtctccaatgatgccttgacgggcgtccgcccacggaaagaatgtgatgattgttcccggcttcccgccttcatccccgaaataaaggtgatacgtacccggatcatcaaaattgaccgtttgcttgaccaatcgcagccccagcactccagcgtagaaatcagcattctcttgagggtggccgacaattgctgtaatatgatggattcccatcgtttttttagccatttttatgcgctcctttataaatatttaaatatactccacaaactcattcacaggctttcggtagccgcgcggccttctgctttctattttttctttcccgattgtaatcatcatgacgacctcaaattgatcatctatattcaaaatctgtttcacggcttcaggatcaaaccctatcatcggacaggtgtcccagcctttttccttagcactcagcataaacatcatcgcagaaagtgaagcatttcttatcgcctcatctctcttaaacagttctcccctgttttcataaaacgaaacggtgttttgaaccatgtgatcatactcttgtttatttaatacccccagcaccttcaatccttcatagatgtcagccgcttgctgatatgcctgcttatcccctaaaaccaaaagaaccgctgatgagctgaacactttatattgtccgtttgcggcctgcttcagcttttcttttacctccgggtcaagaaccgtcacatattttgtatgctgcaaattaaaagctgatggagccaacgcaaccaattcaaacatttcgttgagctcatctcttgtgattggatgttctggaagaaagttgcttgcagatcttctttcattcaccagctgtacaaattcagccatttctctcgcactcccctttatctcgaattcgagatattatggtataaaaaatcaaataatgtatgatcaaaaaacaaaacgatcggcaggttcttatcctgcactctaattaaattgtctcgaattaaaatatcttgaattcaggataataataaaagataaatactcaaatgtcaacagttcatttttaaattcagcgcaattttgtttatgtactatttagccctgctccaactttttttctgtcaccttatttattagtaaacaggaaacaaccttgctatagacccactcgaaactgaattgatatgataagcaaagtgattacacaagaaaggatacggagagcgaatcaagagcgctcctatttttttgtgcagttttataggaggaaaaaatgacaagtgaaagagaacaaataagcaaaaaagttgctttgattgcattgatagccaatctgatcttaatggcaggaaagatcttttttggactgataggcgatagtgaagcagtttttgccgacggtatacattctgcagcggatgtcgtggcttcaattgctgtcctggccgtcatcggcatttctaataagccgcccgatcaagaccatcctttcgggcatggcaaagctgagatcatcagcgaagcgattgtaggaatcatattagtgctcgtttccgtgtatattctgatagaagcgatttcgtcctttgttgaaggtccaagcatcccgcaatacagcgcattgtttgcggctctgatatcctacgtggctaagcagatcttatatcgttattcgatcaaacaaggggaaaaatggaacagtaaagcgattatagcgattgcatacgatcataaaggcgatatcgttgcctctcttgccgcttttatcggcgtcctattggcgattatcgggaacacacgcggatggtcctatctgttgtacgccgatgcaattgccagtgtcatcgtggcgtacctcatttttaagatttcaatggaattaatcaggccgtctgttgacgttctcatggaaaaaagtgttgatcccgaactgatagaggaatataaagcggttattttggattgccctcaagtcaaacggctcgataaaatccgagcaagagaacacggccactataaattgcttgatgtccggttatctttggatcatgatttgacgattaagcagggacacgatatagcccgggaaatccgaaatgaaatcaaaagacacttttcagatgttgaagaagtgctcatccatgtgaatccttattttgaagaatgaaaaagcagcttgtagagaaaacgatgttttttctacaagcttttttgttttgtgctgtttctttacatattcgtttgatttcactgatccatatgctttctgataaaatgcagcagcgtgtttccttgagcggtcaatatgacgcccttcgcgctgcacttcggacagggcgtcccttctttctcctcgccggttccttcacaatgcggacatgtgagctcaagatcgtcggttgcgatcaccatgaatatccctccttttttgattgtctgtccgtctccagtcactttccatggccatcacctccttaacaacgcaaaaaaaccccgtccatcaaaggacgaggttttcgcggtgccacctttattaacggctgaagagccattctctcaaaaagtacagaaactcagggtttcaatactcctatcttgataacggggaaagaatcccggcaccgcctactgttatttcagcgcagcaattcagaagcccattcggcaccggacggggatcggttcacagcggccaccgactctctgaaccccgcgcgctgatgcgtacttactcttcctcagcattgttcatccgttctatgattttaaaatgtatcatacgctgtcatccggcggaagtcaataacctttcggatcggacagtccgagcatgtcccgcgccatttgcatatgctcctcttgccccgtctgaagcgcgaacttcgccgtttccacagggtaagcggcctgccattctgacacatgctcctgcattttcggccagacgcgcccgccctcagcttcgtagctcttcatcagccgttttgtttctttttctcctaatatcacttgataaaggacaaaatccttggccggatcggcaacctttgcctccgtccaatcgaggagacccgtcacacgctgattttcgccgatcaaaatatgcggaggatgcaagtcgccatggatcagcgcagaaaaatcaggccagtacgagctgtcatttatccacgtttgccatcttttccaaagctgttctgaaaccccgatttctttttttatatgatccattgattccgccgccctttgcctgacgtcatccggttttatgatttcaattccggatctggaggccgcatccgtgtctgccccgtgcagcccggctaatgctgcggcaagcgagccgacaaaaccgtctgaaggcggctcgtgttccatattccagacatactgtttcttatccagatcaattgcggcagccggtattccgtccagtttcggataagcgatcagttccggtgtatgaatccgccaatcggggactgatacagcggcatggctgcggagaaacgcgagaacatcgctttctgcagccgctctttcgataacatcgggacggcgcggctttcggagcacccatgtcacgccgctgtcatcttcagcaaatacgacttggaagtccatacccgtttcatttatgtccgccccttcatattttaaccgtaagccattttcctttgcgatgttcaaaacggattctatttccctttgtttttttgtcatcttgtttccccatttcccttattgactgacacagagcttcgcctttaggcggagaagaaagagatgtgtgaagacgccaaaaagagggcggcataatcgccgccccctcactattactgtcaggttccttattcaggcagacaatcccggtttcctccgcgctcaaggcagagactttgacactatttcattagtgcgaaaaccggaatttgatcagccatcaggatccctccgttccttcttagttaacattattttacacaaaaaccttatatacgtaaaccctatttatcagcttaccggctgcctccgctgacaaattttgatccttcgcgtaaatctttcgcctccaaaaaaaagacgtgaatgaattttttcatattcactttaaccggagaaagcggcacggtttccttggcctgcatttctttcattctcttgctgacagcggggaaatcaaagaatttcgaggcgtaatattcaaatttggggtttgaaaaatcagttgtgcccaatgaagcgaaatggtttaacgaatgaatgacggcccttctgatccgctgttccgaggctttgatttctctgttaacctcggcttgtgccgccgcaggtcccagcttccggatggcggcgtttgtaaacatctgctttaaagacgggatgtttctttccgcctgttcatcctcaaataaatagtgaaggacggccatgaggtcatgcgccccgctttctcccacgatgcctaattccgacaaaagaaattttcctgtttctttgattgatttctcgtgcatcccccccggcccgctttttttcggctcattccgctgaataagacggcttaacgagtgttggatgtcgccgatcgaggtttccagttcaatccgctcttttacttttcgcaaaacggtgacgatctcgattttgttgatcggtttatggataaagtattcgatgccgagagaataagcttctcccaccatttcctttgcctccacctgcgatatcatcactgcttttccgttgtacgccccctgaagatgccgtatcgtctcaatcccgtcccggcccggcatcagcagatcaattaataaaatatcgacttgtttgaaatggagataatgcccttcaatctggcttccgtcctctgcctcaccgacgacttctcctaagtcctcgtcctcgatcatctgttttaaaatggaacggatcgcccggtcatcatcagctataaaaaaacgcatattatgagttcatcctttctgcaatcaaatgcttcaccggcagcttaatcgtaaatatgacgccttttggcttgttatgaaaggaaatgtctccgtcaagttcggttacgatttccttcacgtatgaaagcccgatgcccgttgaaggtgcgccgaattcatcgtatttggacgtaaaaccgggatcataaacgacctctccgattttttccggaatgccgggaccgtcatcttccgcctcaaattcggccatccccccctccgccctgcgcagcgcgaggcggatctcacccctgtcacccatggcttcgacggcattggcggtcaggttatttaagatcgacaggacggtaaagacgtgataatcggggtgttctccttcaatcacgtttttgaattgaatgtctttgcctaaagattcggcgtatttttcattgatgcggataacgaggccgaccagatcggcggcattcatgtaatcccggaatctctcatttgaaatcagcttcgacaggccggcgaatattcgctgattgtcttttttcacttcatgaatttctcccgcaaggcgcagcattcggctcccgagctcccggtcgttcccgctcatttcccgatacagctgataggattctttcgtcacatgctccgtcgttttcagcgtttttttcagatgaatcgtttcttcatataagttagacacaatcatcagcatgtgctcatgctgctttctcgtttgtttttccctgacctgagattcgtgcagcttcatcacgttgaaaaaactcagcacaataaatgtgtgagaaacagcgataaccgcaatatccgccagcttgtccggcatcataatctgcttgccgccggaaaactgaaccgtcatttcaacggcatcggacgccatttcaatgagaaaaccgagaaacccgatcatgagcggccgatcccaaaaaagcctgaccttcagcacataaaacaaacaggcatatgtaaagtaaaaaaagaaactgggatattggctgaaaaaagccgccgtaaatccggcatgctctcccccccagcacgccaggccgatccggaatcccacaacggctgcacctgtcaacagccctgacaataccgccggcacatgccgaagcagcagaagaaaaaagaaaaaagccggggcgccgaagctgatccgatatacctcattcagggggtaaaatttcagttcccccgccagcggcacggtgatcagcataagagcgaaaagatagccgtcttttttcagtaaatagtcgagcctgatcataatcacttccttcttctgtctattttgaacaagaccgatacagtccgcaaatttctttagacccgaatggcgggacactccggctgatttataaatctatcggcttattttaagaatgattttgtcgtattttgtatgattctgtagatgtcattatacattaacatggaacacgctatttttgaaaacgttttccaagaccggtttccgcttcggacaggcttgcaatagaggaggaatgttatgaaagatatggtcagagagcgccttgaaaaagaggaactggcttcacttttacaagattgggtcgagcattaccgaccgttttccgtcaatggaaaaagcgcaaattatatacccgccctcggagaaatcaacgactctcagctgggcatttgcatattagagccggatggctcaatgattcatgccggtgaatggaatgtgccgttcacattgcagagcatctcaaaagtcatcagctttattgccgcatgcatgtccagaggcattccttatgtgctcgatcgtgtggacgtggagccgacgggtgatgcgtttaattctatcatccggcttgaaatccataaacccgggaagcccttcaatccgatgatcaatgccggcgccattaccgtcgcctcgctgcttccgggtgaaacggcgcataataaattagaatatctcttttccgtttttgaaaaattaataggaaaacggcctcacattcacgaggaggtcttccgttctgaatggcagaccgcgcatcggaacagagcgctcgcctactatttaaaagaaacgaactttctcgaggcggatgtggaagaaacgcttgaagtgtatttaaagcagtgcgccatggagggtacaaccgaggacatcgctttaatcggattgatacttgcccatgacggctaccatccgatccgacgggaacaggtcattccgaaagatgtcgcgaaactcgccaaagccctgatgctgacgtgcgggatgtacaatgcgtcaggcaaatatgcggctttcgtcggcgtcccggccaaaagcggggtatccggcggcatcatggcattggttcccccaagcgccagaagagagcagccttttcataacggatgcggcatcggcatttacggtccggccattgatgaatacggcaacagcctgaccggcggcatgctgctgaaacatatcgcacaggagtgggagctcagtattttttaatcaaacgaaccaagaggtgattggatgcaggaattccttgaaaatgtaatcggctcggcaaatgattttttatggtcaaaactgttaatcgtactgcttctttctctgggactgttttttacgttcagatcaaagggtctgcaagtccgcatgctgaaggaaatgatccgggttttgaaggaaggcgcggccgcccggacaaaaaacagcatttccccgtttcaggcattttgcatcagtatggcggcgcgtgtcggaacagggaatattaccggaatcgccattgcgatcgcactcggcggtccgggcgctattttctggatgtggattatcgcagtcatcggttcggcttcaagctttgttgaaagcacgctggcccaaatttataaagtaaaagatcaaaacggattccgcggcggcccggcctattacatggaaaaaggcctgaagaaacgctggatgggcgcgctgttcgccgtattaatcacactgtcattcggggttgtttttaattccgttcaatccaatacgatcagcgtcgcctttcaaaacgcgttcggcaccagccggcttacattgggcattattttaatcttggtttttggcggcgtaatcttcggcggcgtcaaacgaattgcgaaaatggcggaatacatcgtagtcgtcttggccgttttatatatcggtgtcgctttctttgtcattctgacgaatatcacccaattgcccggcgttctgtcgctaatcgtaaaaaatgcgttcggcattgatcaggcagcgggcggcgctttaggtgcggccttgatgcaaggtgtaagacgcgggattttctcaaatgaagcgggtatgggaagcgctccgaacgcggcggcgacagctacgacgagccacccggtgaaacaggggctcattcaggcattcggcgtcctgacggatacgctcgtcatttgtacaagcacggcgcttatcattttattttcagacgcttatcaccagccgggactgagcggcatcgcgctttctcaggccgccttgagcgaccatgtcggcgcgtgggcgtcaggtttccttgccgtcttaatgcttttgttcggcttcagcgctctgatgggcaactattattacggagaaaccaatatcggatttttaagccagaacaaaaagtggctgttcatttaccgcatctgcgtgctcggaatggtactgttcggctgtatttccaaagtccagcttgtgtgggatatggctgacttgttcatgggcttaatggtggtcgtgaacttaatcgcaattttccttctgtcgaaaaaagcatttgccgctttgagcgattatgcccggcaaaagaaagccggaaaggaccccgtcttttacagagatgtgctccctgatgacgacgggatcgaatgctgggagtattcagatatcgcgaaaagcgcgaaaggcaaacatatttcctaaacaaaaggtgttcaggcagcgtcctgaacaccttttttccgccggttcattgacaaagagaatagcgtccattaccctttttatatattttcagtaaagtcagaaaggaaggcctatgaatcccattacacaaatattaaatgaatacccggttatgatcatagacggcgcgatggcaaccgagcttgagcggatgggctgtgatttacatgacgatctgtggtcggccaaaattcttttggagagacccgaactgatcaaacaggtgcatgcagaatattttgccgccggcgctgattgcgcgatcaccgccagttatcaatcgacaattgaaggatttgcagcgcgcggcatcccggaaaccgatgcgatacgtctcattcagacatctgttgaacttgccgcacaagcacgcgatgaattttgggcgcatgaagaaaaccgtttacaccggcctaaacctttggtcgccgcttctatcggaccttacggcgcgagcctcgctgacggctctgaatatcgcgggcattacggactgacggaagatgagctgatcagctttcaccgcccccggatgaaagccctcatagaatccggcgccgatcttttggcctgtgagaccattccgtccctgtcagaagcaaaagcgatcacaaggctgctggaggaattccccggcacttatgcatggatcagcttcagcgccaaagacgggcggcatatcagcgaaggcacgcctatttccgaatgcgcggccctgcttgactcctgcagccaaatcgcagcgatcggcatcaactgcacaccgatcgaatatattccgccgctgatagaagaaatcaaacgggcagcatccaaaccgattatcgcctatccgaactccggcgaacaatatgacccggtgacaaaaacctggaaaggcgcagcgtgcgaaaaccatttcggaaaaagcgcgcaaagctggtacgaaaacggcgtgagcctgatcggaggctgctgccggacgaaacccgcggacatccaagccattgccgattgggccaagaccttaaaaacaacttgactaatcggaatagtttgtatattctattcaaaaagccggttcgccggaatctcgtgccgttcgccggcatgagattttttattagaacggccctcgcagaaagttggaaaacaatgaacaacaagaacgagacgaattttcagagaagtatgaaaagcagacacctctttatgctatcactcggaggtgtgatcggaacggggctgtttttaagctctgggtataccattcatcaggcgggtccggcgggcaccattttcgcttaccttttgggcgcgggcatcgtctatcttgtcatgctttgcctcggtgaactgtcagtggccatgccggtgacgggcgcattccacacctatgcgaagacctatatcgggcccgcgacgggctttacggtcgcatggctgtactggctgacgtgggcggtggcgctgggctctgaattcacggcggccgggctcttcatgcagcgctggttcccgcatacttcagtttggatgtggagtgcggtattcgctcttttcatctttttattaaacgccttctccgtgaaattttttgctgaatcggagttttggttctcaagcattaaagtcttagccatcttactgtttattttattgggcggagcggcgatgttcggcctcgtcccgatgaaaagcggtgaggccgcacctatgctgtcgaactttacggatggcggcagcctttttccaaatggctttttcccgatactgatgacgatgctttcagtaaacttcgctttttcagggacggaattgatcggaatcgccgccggggaaagcgccgatccggaaaaaaccgttccgcgcgccattaagaccacagtctggcggctggcgcttttctttatcggaacgatttttgtgctgtcagggatgatctccatcaaggaagccggtgtgattgaaagcccgtttgtcacggtatttgacagagtcggcgtgccttatgcggccgatctgatgaatttcgtcattttaacggcgcttctgtccgcggccaattcagggctgtacgcgtcatcacgtatgctgtggtccctgtctaaagaaggggagcttcatcccgcctttgccaggctgacctctaaaggcattccttttaacgctctgatcttcagtatgatcggcggcattctgtcgttgttgtcaagcgtatttgcagcggatacagtctatcttgttctcgtctccgtctcaggatttgcggtagtggctgtgtggatgagcatcgccgcatcacaatttttgttcagaagacgatttcttaaagaagggcaccagctttcagacttgaaatacaggacgccgggatatccggccgtaccgatagcggcctttctcctatgcctcgcctcctgtatcggcatcgcttttgatccgaaccaggccatcgccctttattgcggaattgtatttatggccgtttgctacaccgcttattacttgaaaaaccggaaaagcagagcccgcgtgcaagccgtaaaatcccaataaccaaaaaaagaaccctgcggcgcaagggttcttttttcatttatacttcaacgacccatctgaacgaatcccgcaccttcccgacttggatgccggcaatcgtttcatagagcttttctgacacttcaccgatcaaaccgttattcagctcaatcgtttctccgtgaatgtgcagcgcgccgaccggcgagatgacggccgcggttcccgtaccgaatacctccgacacctcgcctctcattgcagcctcatagatgtcatcaatggcgacctgttcttccctgacacggatgccccagctttttaacagctctatcacagatgcgcgtgtgatgcccccgagaatgcttccgtttaacgccggcgttacggcctctccgtttatgatgaaaaagatattcatactgcctacctcttcggcatatttcttttccactccgtcgagccaaagcacctgatcataccccagttcttcggctttccgctgagcctgtaagctggccgcataatttccggacgttttgacgtcgcccactccgccggtgacggcgcgcacatactcatcctccacataaatacggatcggtttcagctgatcgccgtaatacgaaccgaccggcgtcaaaacaaccatgaacttgtaacgctttgaaggccggacgcctaaagaaggctcagtcgcaatcacaaacggacggatatataaagaggttcctttttctatcggtatccattcctgctccagctccaccaattgtatcaatgcttccagcgccagcttctcgtcaagaggtggcatgctcatccgccgtaacgatttattcagccgttttatattttggtcaggacggaacatcaacacccgtccgtcttctgacctgtaagccttcagcccttcaaatacggcctgcccgtaatggaaaaccgatgcggaaggatccagatggaccggttcataaggtgtgattctcggatcatgccaccctctcccctcttcgtaatccatgacaaacatgtaatctgtgaagtacttgccaaatcccaatgaagcggaatccggtttttcctttctagctgtgaccttacgtctttcaatcagttgattcaacaaaagcacacctttcttctaattgttcaaattttcagtcttttctgggctgcatgttttttctgtcccgaatcttgtatgcacagatatatgagaatgcagttgaccatatcatatcaaatataccacttataagaggataattatcaaaatttttaatattttcagcggaaatctttctttattcttatgctccttcatttttttcaatgaggactttctgtcatattcaatgattgcgcttacataatgtaaagcaatccttcctttcgcacagtcaatcatgtgacaaatttatggcggacaggaaggtggttgccgcctgcttcacgaattacgtaagaaatgcgcaagtaaaagggggattcgcttgaaaaaatttatcgcattccagattttgatcgctttagccatcggagcattgatcggccatttcttcccggatttcgggatggcgctgcggcctgtaggagacggatttatccgcctgattaaaatgattgtcgtgccgatcgtgttttcgaccattgttatcggagccgccggcagcggcagtatgaaaaaaatgggcagtctcggcatcaaaacgattatttggtttgaagtgattacgacgctcgttctggcgctcggtctgttattggcgaacgtgctgaagccgggagtcggacttaacctctctcatcttgctaaaaaagacattcacgagctttccggctatacggaaaaagtagtcgatctgaaacaaatgcttcttgatattatccccgttaacatcattgacgttatggcgaaaaatgatcttctcgccgtcatttttttcgcgattttattcggtgttgccgcagccggcatcggcaaagcctccgcacctgtcatgagtttcttcgaatccacggcaaatattatgttcaagctgacgcagatggtgatggtcaccgctccgatcggcgttctcgccctgatggccgcctccgtcgggcaattcggaatcgcgcttctgctcccgatgctgaagctgatcggcactgtgtttctcgggctgttcctgatcctcttcgttctgtttccgatcgtggggcttatctttaaaatcaagtactttgaagtgctgaaaatgatttgggatctgtttttgatcgctttctccacgacaagcacagaaaccattctgcctcagctgatggatcggatggagaaatacggctgtccgaagcgggtcgtctcctttgtggttccgtcaggtttatcgcttaactgtgacggttcaagcctctatttatcggtgtcctgtattttcctggcgcaggcgtttcatgtggagatgccgctttctcagcagcttctgatgatgcttgtgctcgtcatgacaagcaaaggcattgccgccgtcccgtcaggctcactcgtcgtgcttctggcgacagcgaatgccgtcggtctccccgcggaaggcgtcgccatcattgccggtgtcgaccgcgtcatggacatggcgcgaaccggtgtcaacgtgcccggccatgcggtcgcctgcatcgtcgtatccaaatgggaaaaagccttcacatataaaggacccgtcacggcagatcagaccgcccggacagaaagtatgtaaacacaaaaaagaccacctcattggtggtcttttctattaatcaatcgccgcatgatcctctttttcaatcaaagcaaggcgttcattgatttcttcctgagtcatttcgtgctctttcacatacatgtttcgttcgttcgtacggcattcgtgactgcagctgcgcatgtatttgtattcattctcaggtgtgcagatcatttttttattacatgccggatttgcgcagttcacataacgctcgcacggctcgcccgtgaaataatcttttccgatgataacgtgctctacgcggttgaccggtacgctgattctttcgtcaaacacatagcactgtccgtcccacagctgcccttgcacttcaggatctttaccgtaagtgacgataccgccgtcaagctgggacacgtcttcaaatccctgcttcagcagccagccggaaaatttctcacagcgtacgccgcctgtgcagtacgtgaggatttttttgccttcaagcatgtctttgtgttcttcaatccagtccggcagctcacggaacgcctcaatatcaggtctgaccgctccgcggaaatgaccgaggtcatactcatagtcgtttctggcgtcgatcacgatcgtgtcaggatcctgcatttgctcataaaagtctttcggtttcaaatgcttgcccgtcgtgacattcggatcaacatcatcttcgagacgaagcgtcaccagctcttttttatggcgcacaaacattttgcggaatgcatggccgtcagcctcgtcaattttaatcggcatgtcggcaaaacgcggatcagctttcagcgcattcatgtattgttccgtctgttcaaccgttccggacaccgtgccgttaatgccttcctcagaaatcaaaatacggcctaacagaccgagctccttacaaaacttcaaatgctgagccgtgaactcttcaggctcatcaatctttacatatttataataaagtaaaactctatattgtttttccatgatttatacaccctgttcaattatattaatgatcacgcacactatactatatcatacaggaaaacgggcgaaagatgaacatttccgtccgtactctttcttccagtcacgcttcgccttttaaaacctgctgaaaataaaaccgatacgtattgcgcaaaaaggtctcaagcgaaaggccggccgcggtctgatacttgccgataataaacggaaaacggtcacggccttttgcccgcagaagatccgcgctgtcttcagccagttctgagatgagcgcctcaacgacaggccggcatgcatcccgcaccgcttcaagaatttgctgatcgcctgtatgccgatactgttcgatcagctttcccaaatccttttcttccataaagttcacttccttacaccatataaaaaagaggagcagcttttataaagcggacgcctcctcctgtgactccgcataaccgatgatctgaccgacctgtaattcacggccttcagtcaggttatccgaaggggtaaacatatctttctcgaatactaaaataacggtcgatccaaatgaaaaatagccaagctcttcccccgtctcaagccggtttccggtgtttgtctgaacgatcgagttaatattcatcgcacctaccggaatcatgagcatctgctgatcagcacgggtcagctcgtacacataacggtaattttttgagagcacatctttcccgtactttaaccccatcgtattaacgggataggagcgtttccccagctcggccagctttttatacgtgcagctgacgggagaatggaagcggtggtaatgtctcgggctcaggtaaagcacggcaaaacacccgccgttatacttgtgatcggcgcttttaaaccccgtcagttcggcgaacgaataatccttcccttttaccatgaaagtttgattgggattaatcatgcccaccgtctgaacgacgccgtccaccgggctgacgatggcgttcttctcttttgccacggggcggagattcaaattaatatcacgaatgaaaaatgacgccagtgaatcaaagtcagaagccgtgcgttccgtttcattccagttaatgcgatagtgtttggaaaacagcggaatcatcggcttgctcagtttcgattcacagaagtttttaatgagataagacgtcaatcgattattagtcagttcaatcaatgaacggtaaagaactttagcggcagtattaaacattgattactcctatgaattttcctatagtaataaaaataaaacaccataaaaacgctccgatggcggcgaagcataagtaggttttgaattccattctgccgattccggaaaagtagcaggtcacgtgtctgatgccggggatgaaataacctaaaataatggtgtacggcccgtacttcttcatccacctgtctactttctccatcctcttttccttcaggccgacccatttcccgaacttattaataaacggccggccggcttttctgccgatgaagtagctgataatcatcccaaggagcgctccgataaagctgatcagaatggagagcccgtaattcagcacgtttaaatgagcgaagtagcccacaagcgtcatcatgacttcatccggaataggcaatccgataataccgagtgtcagcataagaaaaatcgcgatatatccgtaatcggatattaattgctgaactaattccatcttctgctctccaggttttcaggcgcctgttttttaaagtgcggaaatttaatgttgctgaccattaaataaccgagcgcgatcgttcccgcccccagaagaaaagcgttattgataaagctcaaaatgacaagacacatacccgcaaacggaatcggcatcccgataaacgtcggcagcttgctttgttcaatattaaatctggaaagacggatcatcccgcagatgctgtaggaaagcgcgattaaaattccgatgaacggaagcgtatatagtgaaacactgtaagcgagcatggacggcgctacgccgaacgtcacgagatcagcaaaagagtcaagctcccttcccatctccgataccgcgttcagcttacgggcggccaaaccgtcaaagaaatcaagaaacatcccggtgaaaataaagatcaccgcagagtgtatattatgatacaaaagggaatgaatcgataagagcccgcaaataaaatttccaattgtaatcatactaggtatataattcacagtttacacaaacctccaattaaaaccatatcaaatcggactgcgtatgcataaagactccattttacggaaacataaaatgaaatcctttcaatgctatcattcaaattcttttattatacagcatttggtgttatttgaacaatctaatctggtgatttttgttttttcgccgttcatattaaggtaagcaatcatggtttcctctattccggattaccctgcttaaatattccatgctgcgatccggattgtccgttcttgatgaatgaaaagccgtatgatgtattgttatttccttctccgtgaaatgagaacattacatataacgattgcggacataaaaagtttcaagaattaaaaaaccggcacaaaacggcctcatacattatctcacaaccccgttttccagtatatagtctgtccaaacaaaaaaggcgccttaccattacggtaaaaacgccttttaagatcattttatgtaattgataaatgactgagtgcttcggccgctctttctctggcctcttcaacggtctcggctgcagaaagcgcaaccgccatacggcgtccgactttcgtgacgggtttaccgaatacgcggacctgagtgctttttaccgccaaagctttctccaaaccttcaaccgcataatcagcaagctctttgggcgccttcagcggacggcttgcccccggcgacagctgaatgatttccggaatcgggaatcccaagaccgcgcggacatgcagcgcaaactctgacaaattttgcgtcacaagcgttacgagccccgtatcatgcggacggggagacacctcgctgaaatatactttatcttcagtaaggaaaagctccaccccgaacaaaccgtatccgccgagctcatccgttatgcttttcgcaatgtgtttcgcctcttcaatctgctgttccgtcatatgatgaggctgccatgattcaatatagtcaccgtctttttgttcatgtccgatcggcgcgcaaaaggacgtaccgttcgccgcgcgcactgtcagaagagtgatttctgattcaaacggaatgaattcctcaacgatgacccggccgtttttcacccggccgccttccattgccatgtcccagcagcttttcagcccggaagccgagcggcacacgctttgcccttttccggaagagctcatcagcggctttaccacgcacggaaagccgattgtttccgccgcttctttaaattcttcgtatgtattcgcgaattcatagccggcagtcggaagatgaagcgtctctgctgcaagccgtctgatgccttcacggtccatcgtcagctttgccgcacgcgcattcggaatgacgtgaaacccttcttcctcgagcttcagcagctcatccgtcgcaatggcttccacttccggcacgattaagtccggtttttctttctcaatgacttctctgacctgcgctttatcaagcatatcaatcacatagcttttgtgtgcggcctgcatggcgggagcatgctcatagctgtcaacggctacagtgacaaccccgagccgctgcgcttcaatgacgacttctttccccagctcgcctgatcctaataacaacatcttcttcgcctgatacatgtcctttggcccctccctttctataccccactcattataacggaaatattcaaaaaataaagacaagacagattacaagctctatcctgtcttttgtgctgattcgagcgattcaatcgccgctgacacgtccttcccgcaatattgccccattaagcataacgattcttccgcccggcaggcgtgagaagcgatgcggcgctttgcttcctcatggttgtcaaggatgccgagagcacagagactgacggggaaaccgagccggcggtaaaacggaagcagctcttcaatctcatgtctccgattctcaagcgcgagctgcaccaatatgccgtaagcaaccttctggccgtgcagcacctgatgtgtctcctgaagaaaactgaggccgttgtggaccgcatgcgcccctgccatcctgcacaaacggccgccatacccgccgaccgttctcgcaagcataatgatcgtttccgccgtatggatgaacggcacggacagctcgcctttctccatgcttacgacggcggcttcactgtaacgcaataacagattacgcatatattccgcctgtctcagccccgcctgcgccatcagaggcggcgcttcctccgtatttctgatgaccgcctcggcctcataccatttcgccagcgtatcaccgatcccgcttttcatatattcaatgggagaggaaagcaaaaacagcggatcaacaagcgtcaaatagcttgaacgcttgtgataatcaactctgataaaattgccgctctcatcatatatgacactcaacggcgtacttgccgcacacgtccccgcaatggaaggaagcatcacagcctcaatatcaagccggtctgccgccgcttttgccaaatccaaaatcgtgccgcctccgataccgatgatcacatccgcgtcttccgcctgcccgcagaccttacgcaccgcctcaggtgaacagtatcctttgtgctgaatcacatcccaggaagaaccgccgccgtaatcggagaacgcctgataggatttgattccggtcacaataacgggttttctgaatgtctccagcagccccggaagttcttttgcgattccttccttgcatatgtactgattcgggccgcttcggacgatatcttcaggcttcattcgaatctctcctttggctggaatttatacatattttctcacttgtcagaaaatacatcaaccggaggtgcgtcagcgcttcgcttcctccgcctccaaaaacagctcatcaagccgctccaaagcttctgccttttcaaaactgctgaaccacagatcatcataagaatcaaggatgcggtaatgatgggaaatcaaatgctgctgcaagcggaactcgccttttttctcgatggctttccaccacaccttgccgcccatcgtcttccccttcggcctgtcaattgtgcggtgagcaaccgtttcaatgacctccagcggatcatctcctaatacggattgcagtgtttcacttgatctgaaaagcgcgcaaaccgccacaacgtgcggccattccgcaagcgcccgccctttctcaatctgcaccagcgactttttagaaaggccgatcacatccgccattttctcctgtgtgtagcctctctccgaccggattttcttcagctggactgagacaagctcagtcatataatcttgatccatctcaacctccatttttatcaatatagccattttacaccgcggcacgccttttttatatcagaacattttcaaacaaatcaaaaggacccgggatcggcttttcattgaaacgatgtacctttccgcataatccagaatgatgcggtgaatacaaacgtacgcccgaagagacagatgcggtctccctggcggttgagctccggagaaaataaaaagctgccgcagctgcggcagctaaaacattataagctgaaaatcaaaattatgaagcgaatacaatccaactcgcactataattgacacgttttttcgaaccttgattgaccattttaaatctgtatgaatctcctttttttaacaaaggtgtttcaaaataagtcgttccatttttctttgcattggcggttttgattgttttccaggcacctttgccgttgacttgcttttgaacgtatattttatacgtgcccttccctttactgttggatttaaaagtcacggctctcaagctgtacttttttgtcgtcttagtgaatttaggatgatatgtattgatcacatagttagtgaaatacccgcttttataagtatgaagccagtctttagcctctgctttttgcggagaagaaaaacccataaaaccaattccgctgattaaaagagtaaaaataatgatgagcgacttaaaaatctttttgcttttcatcgagaaaatccttccttcctgtaactatttaccctatttatgttaatgacaatatagctaatcataaatccgtccaactaaccattttgactgcagggagagatgaaaacagccctgaaaatgactatatgactactacttatgattcttgttatttttgattaagtgataaagttactttaaagcgctatccattttgctgtttttgtatcaattgtcatagagagatcttttcctatcaatgcctctctatcggcgtttgtatgatggggctgtcctcggacaaactcctgcacccatgacaaactgtcatacgtttgccacctatgaatgaacgcacactacacgtaatggagggattgcaatggacgaaatggtcctggaaacacaacaatggctgaatgagacgtacaaaggcagacacgggtacaacaaggtgccggaaaacggaaaaacaggctgggataccatttacggtctgacacgggcgcttcaaattgagcttggtatttcagaaccagccgataacttcggaccgacgacacaaagattgtttaaaccgttgaaaaagcaggctcccgattctaagccgacaaacatgaattacattctgcagggggcgctgtggtgtaaagggtttaacccgggcggattttctggcgttttctatgaaaataccgaaagcgctgtaaaagagtttcaaaaagcggccggacttactaagcaagacggcattgtcacggcactcattatgaaggctttgctggatatgagcgcttttcggttagtagcgggaggcgacaaaagaatccgccaaatccagcagaacctgaaccgggattacaatgactacatcggcttgatgccttgtgacggcttatatgcccgcgatacaaacaaggccctcatctatgctctgcaaaaagaagaaggcatgagcacaagcgtcgccaatggatttttcgggaacggaacgaccagcttatgtcctaccttgactcccggcgattcacggacaggctttgttttgattgttcaatacgcgctttactgtaatgggaaatcatttgaccccggtgaattcgacggaaaatacggcgtcggagttgtatcggcagtgaaagctttccaagaatttatgtgcctgccgcagacaggttatgcggacatgccgacgattaaagctttattatcaagctcaggcgacacaacgcgggctgcttcagcttgtgacaccgctgccattttgacggcagatacggctaaaactttgcgtgagaatggctataagatcgtgggaagatatctgaccgggaatgtgcggactagcagcggactgacatcgaaagcgttaacgtcaaaagaactttccgcgattttcaatgccggcttaagcgtgtttccgatttatcaggacggcggctatgaatcttcttattttgtaaaagaccaaggaacgagagatgcgtacagcgctgcatcagccgcccgaagattaggttttccgtcaggaacgaccatttactttgccgtcgattttgatgcgtatgattatgaagtcacggataaaatcatcccttacttccaagaaatcaagtcagcttttatgaaaatgcaggcgttctcaactgcgccgaaatatgaaatcggggtatacgggccgagaaacatttgtatccggacgtcagaagcaggtctgaccaaatatagctttacggctaacatgtcgaccggattcagcggcaacctcggatacccgatgccgaaaaactgggcttttgatcaattttatgaaggcacgatcggaagcggagcgggaaaagtcgccattgacaaagacggatactccggaaaagactcgggtgcaagcagcgtccatccgccttctgatcccgtgtatgatgcaagactgcgcacactgacggacattttaacaaccattcctgctttagaaaatatatcgaatcttgcgaatgccatgtttgaattcgacaagacagaaaccatttatgcatcacctgaaatggatattcttttatctacttcacttttggcaacagtgccaagcgaaggttctcccaacacagttaccattacaaatggcaaaccgggagcttatattaccggtctgatgggagattcacaagtctcttttacagcatcacaaattgattcgtatcaaaacctgcttaacagtctgagcttgtcagtgcgcaacggttatttagaagtgtatgtcaatccggctgcgggatcgctgaatattcaatttaaaatttatacacctgatattccggtcggtgacagtgctactactggactaacaactaccattacatttaaaataaaacaaaagagcttcagattgccggattccgaagaggtgtactctccggattgggattctgtcgtgaataccatggctattgcaggcgcaggaattattgttattgtagggatcggtgctttagtcgttttagcacctgaattaggaggagctgcagccttgttcagcacagttttatcactatttctataattgaacaggcagctccttgctccaggaatgctcaatgagtattcttggagttattttttaaggaggattcgtatgaagattgatatgcagacatacaaggacaccgttcaaaaaatagaaaatgatttgattccgcgaagtcaaaatgacaaagaactgcttacatatttaatgaaacaagattcgctcacactgaatcaaatgaaaatgtgtttcactgaaccgctcctcaccttccaacatactgtcaaaatcgtatgtacagtcacattcatcacgttatatatcttttttttcagcactcattttaatgatttgattgaaatggctctgcagatggtttttggcctggccggccttgtttggatttttgctgtatttccgttttcaaggaaaatccaagtgtctgaccgtttcagacaaaaatctgaaaacacccgtatcaccggaatgatagactttgtcctcgaacaacgatacaaagacatgatcagttaaaaacccctctgcttaaggggtttttttatgatgcaatcccttcaccccccttatcaaaaaaggctcttcccctttggaaataaccggaacacccaatttcgttttcaatataatgaggtagtggatctgcaaagaaagaagggcgacatgatgggtatcattaatggcaaaatgttcattgaccgattaaatcagctaggaaatgagatttggcttgatggtgaaaagatcgagggacagatttctgaacatcccgcatttaagggccttctggaaacgaagcgctctctttatgatttgcaaacgaaaccggacatgaaagatcaaatgacttacagtcttcccggtaaaaaagaacgggccgggctttcatacctgcagccgaaaacgaaagaagacgtaaaaagaagaagaaacatgttcgaacattgggccagacacacgcacggaatgatgggacgaagcccggattatatgaataccgtgctgatgagcttcgcctcctctgccgcgcttttgaaagaccgtgatcaatgttttccggaacatgttcaagcgctgtacgaacgcgctgccgcacaggatctttcttttacgcacacgtttatcacccctcaggtgaatcgttcacaaatgggtgtaaacgtatcgccgacacctatctcggcaaaagtcgtcgataaaaatgaaaaaggccttatcatacacggcgcgcggattttagccacacaaggcggcctgacggatgaagtgctcgtggtttctctgcctaagatgtattttgaatcggatgaagcgttcgctttttcaatcccttccaatacaaaaggagtaaaattcatctgcagggaatctttcgtactcggaaaatcatcgtttgattatccgctcagctcaagatatgaagaaatggattctatcgttgtatttgatcacgttttggtcccttgggaacgcgtatttttttataataattacgaggcggcttttgattttaatatgaaaagctcttttaacgccttcgcatttcatcaagttatcacgagacaaattgtaaagacggagtttctcctgggcctcgcccaaacgcttgtcgatgcgatagatgtgggggaatatcagcatattcaggccaagatggctgagatcatcaccggtctggaaacgatgaaagcccttttggaaaagtcggagaatgatgcggaaacagacgaatggggttatatgcgtccgagtgtcactccgcttcgcgtggtcagcgcgattttccctgacatctacccgcgcttcacggaaatcatccagctgatcggggcaagcggaatggtgactttgccgactgaaaaagcgttccgttccgacatcagaggagaccttgaccaatatttacaggcggccgaattgaacgctgaggaccgggtaaaagtgttccgcctcgcatgggatttgaccatgagcccctttggaacaagacagacacaatatgagcggtacttcttcggtgaccccgtccgcttagccagccatctgtacagaagctatccgaaagaagaacagaccgcggtcatcaaggaattcctgcacattcataaataaaacaaagcagagaacgcatctctgcttttgatagctggatcggctgccgccgatcctattttttgttttggctgatcaccaccatcgtaatatgcgataacgcgaaagagacgagcgtgtacacgacggcccacccgataaacgagaaattcaatatggtaaaggtgcatataaggcaaacggctaaagcggcagccggcataatgaacgcgtttttaaacaggtacgttccggcgactgacaggatgatgatacaaagcggcagaacaccgaacgcaaaatccaattcatcaatcaacagatgcactcccttcgcttttcttagttcggcctaacacatcttatgcctgagtacaaaatcgagtacatcaaatctttcgcgctccggctgatattccctccggttatttattcaaaaaaatgaaaactttccttaaagcgtttacattcacgccagactgtgataatttaagaaagcgctatcatatacaagttaatgatttttggatggagatgaggagaaccaggaaaccgcgccctttcataagggtgatttctggttctttttgtcattttcaaggaaaggagtcatacatacatcatgatagacgttcagcaaaggggaggatatgatgtttcaattgttcaagccggctccgcatattgagagattggatgattcaaagacggatgcggcctataaacggctcaggctgcaggtatttttggggattttcatcgggtatgccgggtattatttacttcgcaaaaactttgccttcgctattccttattttcaggaacaagggttttcaaaaggggaacttggcttggtgcttgcggccgtatcaatcgcttacggcttcagcaaatttattatggggatggtgtctgaccgctgcaacccgaggtatttccttgcgacaggtctgtttttgtcaggtgtcgtcaacattttatttgtttccatgccatgggtcacgtcaagcgtgacgattatgtttatttttatgtttattaacggatggtttcaagggatgggctggccgccttgcggacggacgatggctcattggttttccatcagtgaacgcggaacgaaaatgtcgatatggaatgtcgcccataacataggcggaggtattctcgccccgctcgtgactctcggcatcgccatgtttgttacttggaaaagcgtatttttctttccggcgattatcgccatcgtcatttcatttgtgattgttcttctcgttcgggacacgccgcaatcctgcgggcttccgccgattgaagaataccggaatgactatccgaaacatgcgttcaaagaccaggaaaaagagatgacgaccaaagaaattcttttcaaatacgtgctgaataataaatttctgtggtatatcgcatttgccaatgtctttgtttatttcgtgcggtacggtgtcgttgactgggcgccgacttatttgacggaagcgaaagggttctctcctgaagattccagatggtcttatttcctttatgaatatgcgggaattccgggaacgattttgtgcggctggatcagcgaccgatttttcaaaagccgccgcgcaccggccggcgtgctgttcatggccggcgtatttatcgctgtattggtctactggcttaaccctgccggtcatccgctcatcgataatatcgcgctgatcagcatcggattcttaatctatgggcctgtcatgctgatcggacttcaggccattgaccttgcgcctaaaaaagcggcgggaacggcagccggcttaaccgggtttttcggctacatcggaggctctgctttcgccaacgccatcatgggttatgtcgtagaccgctttgactggaacggcggctttatcatgcttatctcctcatgcgtgctgtccatcgtcttcttggctatgacgtggaatacaggcaagcgggcggagcatgtgtaagaaaacaacataaaagattaatatttttgcagtacagcatttacaacgattttctacactagagacagatattgatttttaagggggaagaaaacatgcggaaacataagttgtttgctttggtattgctttcattcggtttattgtcattcatcgtcacgcctgtatcggcggcgggaaaaggaaacctcttgtctcctgacagaattttaaccattgcccatcgcggtgcttcggggtatgtcccggagcacacgatcctttcttatgaaactgcgcaaaaaatgaaggctgactatattgagctggatttacaaatgacaaaagacggcaagctgatcgtcatgcatgatgaaaaactggaccgcaccacaaacggacaaggctgggtgaaggatcatacattagcagagattcaaaagctcgacgccggttcttggttcaataaggcctatccggaaaaagcaaaaccgcaatacgccggacttcgcgttcccacacttgatgacgtgttaaaacggttcggcagacatgcaaactattatattgaaacaaaggcgcccgaaacatatccgggtatggaagaaaaactgatcgcctcactgaaaaaatacaaattggcaggtaagcatgcgaaacttggacaagttatcattcagtctttcagcagggagagccttctgaaaatcaaacagctcgatccgaaacttcccgccgtccaattgcttgaagcggaacagatgacctcaatgactgacgcagatttaacagacatcaaaacatatgccgtcggaatcggaccggattacaaagcgctgaacgctcaaaatgtccgaaacattcgcagccacggcctactgcttcacccttacaccgtgaacagcgagacggacatgcgccgtctgctgaattggggcgtaaccggtgtgttcaccaactatgcggatatatttcaaaaggttaaaaaagaatataaatcataaagccagcatgggttcggagatgatgccgaacccatgtttttttgcctgatcaaaaaaccttgcgggaacgttaccgcaaggtttttatcaatcattattcttttccggcagcggcttccgcctgcccgccttttaattgatcgttgattgctttggcgtctttcaaatactcagtcttgaatccgctcttcagcgcccacgcatagaaggcaagggcaacgattgcgatcagccccatatcccatccgtacggaatgatgttcagaccgccgaatttttcacttccgagccatgaaatgaccatcatgctgagcagatagacaaccatccaaacgccgcctttaaagtttctgcggaatcctttccacttcgctttcgcttggtagtagaaataaatcggaaggccgatcaaaatgataaacagcacctgccctgttaacggccagcgcgcccaatacagcacgagagacgcgaacacgaagccgagcggtgcaaccacgctgagtcctttcagacggagaggcctgtacaaatccgccgccgtcctccgcagcgtcattaccgtcacgggacccgtgatataagaaatcagcgtcgctacggaaatgatttcagcaagcacgccccatcctctgaataaaaacagaaagataaacgatacgatcaggttgaaaatcatcgcttggcgcggcacgccgtacagcggatgaagctttccgaaaatgctcggcatatatttatttttttccatgccgtaaatcatgcgtgacgtcgtagcggtatatgtgatacccgttcccgacggagatacgaacgcatccgcataaagaataatgacaagccagttgatattcaatgcgatcgccaaatcggcaaatggagagttaaagttcaggtgactccagccgtgaacgatcatggaaggttcaaccgcaccgataaatgcgatttgcaataggacgtaaatgacggttgcgaccagcagcgaaccgacaaccgcaatcggaatcgatttgccgggattttttgcttctccggccatgttaatcgggctttgaaacccgttaaacgcaaatacgatacctgatgtggccaccgccgtcagcacgctcgcccagccgttcggcgcaatgcttgaaccggatgtgaagtttccgccgtgaaaaccggtaaacagcagcgctccgattgtcagccccggaataataattttaaagatggtaatcaatgaattcgcttttgaaaacaagttaactgtccaataattcagtaaaaagtaaataatcagcaatacggatgcgaagccgagcccctctcccgtaagtgtgccgttgtgaacgagattgcttgtccactttgcccagtcccacggccatgagctcatatattgaacagacgcaaccgcctccaccggaataacggaaacaatcgcaatccagtttgcccatcctgcgataaatccaataaatgatccatgagaatattgagtatattttaccattcccccggcttccgggaacattgaacccagttcactgtaagaaagtgcgataaacaaaattacgatcataccgataatccaggaaataattgcggcaggtcccgcaatctgagccgcccgccacgccccgaataaccaaccggagccaatcatcgacccaagtccgaccatcatgagtgcaaacgttcccattctgcgatgtaattgattcataaagttaacacctttcaattaaaatatgactccagcgctatcatatatttataatattattctgaaaatagttttgtcaatctttatcgcattaaagcggcaagccaaaattaaccttccgatgtttaaacagccgttaagcgggaataactactgcaagccataaatagaaaggagtttttatcgtgaaacaaaaactgctcatttcaggacttgccgtgtcgactgtcggagtgacttcctacctgctcaaagataaatcaaaccgccaaaaggtgatgaactttatccgcaatatgaaaacatcgctctccgggaagcaggatattgaatcattccccgtcaacaaagcaggcaacccgcatcccgaagatattgaagataacaaaatggtatccgaaggctccatgtacccggttcaatattatgatgacaagaagaaataatctgtgcccgggctgcccggccgtatcaaacggcggcagctttttttatgcagacggcgttttatagatccgccaatattggcgcgatcctttctcccgcacggtaatgcccagtttggatatttccgctttcagctctttcgcatcagccttttcctcctctttcagcgccttttctctcgcttttaaaagagcatttgccccgggctccaaatccggcgtgtccggcacccaccgtttgtattcttctttaaaaggatcttccgtccccagccagacatacccatgcgcgcgaaacgcatcagccgctttttcaaccgccggctcaagcttctcccgaaaaagctcctgtccttcagtgcctaataaaacaagatacttcccatccgtaaacacaccggaaatgctgtctttcgaaaacacgctttcttcattatatatggttaaggacaccccgctgtccgtcacgactgccacaagactttctttaaaagctgcccgcgtcagccacactcccccaattaagccgataacggcggttgcagccgcagccttccatccgtgaaaggaagcgattatttccagcggcccgtgaaaaggcagccaatccaatgttacggcccacttcgtaatgaccggcagaaaccatccgatgaccagccccaataatggcggcaccagataaaccaaagctttttcaaccgatgacaactcaagaaccgtctgtttttttatttcgttcatgtttctcctccgtctgtgtttttcacaactatccattatacaaagggttggatgattctgtaaactggttccgaaacaataaaaagcctcccggccgccgggaggctctttaaaatagaagctcatatacttcattcaattccatcgtgcgcttctcatcctgctcgttctcagcatatttgatttccttttcaagcacctgattcagcgcatccatttccagatcatttagatctttcacgaactcgccctcatttgcataatgcttcacctgaagctttttataaaccccccggcacacatcatgctccaagtggttcgaaagcgactcgcgcaaatatccgagtgtcctgtccatcatgtaagccctcccttttctttaggaatagcttcccggaaagagagaaaaactatacatgaaagcaccgggcggctgttttaactctgtacctgaatggagaaaaatccgctgcttaacggcgtgtacggcccgttcagccccgttgcggagaaagagaacgttcctgaactgacataagaaagaggaacgctgtaatatttaatatagcctgtaacgatattgccgtttttcgtatattcatcttccagcgcttttgacgtaagatttgtaatattcgttccgttgttaaacgcctggatcgtattattgttcggatacccttggaaatatacggctaaataacccgttgtccccttcatcggttttgatgcgctgatttggttcggaccgatattttcccattggtaattctgaccgtcagacgtcacaccgataatacggatttgtgttaaagcaggagccggcgccgcagacgctgacggaacccacaacccgctcacaagcaacaaagcagcggcggccgcggcaaatagcataacgagtctctttttcatgtttcttcctccttgtggttcaaatttataattatgttaaatattataagtttcattttatcagagaaatcaatagatagacagaatcaatcagtcaaattggtgaactttttatataaaaaagctatctcctaaaggagatagcttatataacattatttctttccacactccaaaattgtgtatttactcggagtctgaattacatttaatagtgttaatccggctttttcaatcaattgttcaaactcggttatctttctgactctgccgcctgcagagcatactaaaaataataaatcacgaaaagcttcttcaggggacagcctgtctgcttcaggcacattttcaactataatcagcttggaatgatcagacatggcaccggctatattttcaagaatagcaaccacatgctcatcatcccaatcgtttaacactttgcttatcacatacaagtctccgccggaaggaatttcctcaaacatactcccttccgtaaactgacagcgttcgctcatctctgaagatgctaaatgcttttttgcactttgtatcgtttttggaagatcaaacaatatcccctttgatttaggagccacacctaaaatgcctgttattaactggcccattcctcccgcgacgtctacgataacatcaaacttttcaaatgagtaagctttcaatatggatggcagactcatttttgaataaatctccatcgccttatccattgtttttaagtaatcttgatcaagactattattctcataccatttatcaccataaatggcttcaaaagcggatttgccggttttgatactataatccattttaaacatagactgcactactgtttcatgcagcagatattctaccaaaggctcaatggattttgctttcccaggcatcaaagtggcaccatactctgttacatcataatagccattttgagcttgggcgaccaaaccgacggattccagcgctcttaagagcctgaataaggcagaggggttcaattcaagggcttcagctatcgcttccgctgaagctggtccattttgaaaggcggaaaatacatccaattctaccgctgttttaactgccagggaaaaccccagccctgaaaccatttgcatgactgcggcctgaggatatttcttcggtacttgtttatcttgctgaactgaattggtcatttacgttaacctccgattaattaaatggtttctgctgcttttttgatataacgcatatactgattgagcagattttctacagtactcttatagtactgattttgattatattcaattccaatgctcaattttttctctcttaccaacacaataaacttaaacttgtaattccaaatttcatcttcacttatatcattcccggttgaaagcggagataccgtaaagctttctgtgtgcagttcattatcaaattcgcccatataattaaatgaaatgtctggttttgatttctcttttatatcttgttttaaatatcttaaaataccatatcctatcccttgatcaggaatattggctaaggtcgagttaacattatctaaactcgaaccgatatgatcagaatcggagacctccaaagccaccggatagattgcagaaaatctgcctactgttctgtagatattaagcttctcactctgatgagtgcggccatggttgcctaagtgcacgagagatgtattactgcctgtttgatgttttactgtcaaacctaaagctgtgagcaaaacagtctcaatagtgaaatgatcttgtccttgaatcgcattcattatattttcagtttcccgaacattaaactgcctgtacacttgtctgttatctttgactttggcaatttgcccctgaatatcaaccggaatagacggagcataaacattttcgattttcgtccaatactctttctcaaacaacagccgttcactttcagcatatttatagagataatcagaccattttaaatacgaatcggttttatttggtaatacaatgtcttcgttacttttaacttgctgatatgctgtattaaaatcttcaagcagtattctccaagacatatgatcaatgatcatttggtgaatgacgattaacagatgttccccatctgcttccttaatgagtgccaatttaacaagcgggccgtgagtcagatccatactggcttgtatttgatttattttcatttttaaaactgattgcggcatgtttattgcattgatcagatgaaagtcaaacaagtcgccgtccgtcaggcctctgattacctgtaccattctatcgcctttacgtttgaatactgttctcagactgtcatgatgctgaataatccgggtgaaaatgtcttttacaatatcttcgccaaacccggcttccctgtataacataaaagaaagattccgatggtgcagagtatcattatggctttcagccagccagcattgaattggcacaagacgggcttctcccgttatcacactgttatcagatgccgctgttatataactgactttattcgaaactccttcgattgtctggtaatgaaagatgtctttcacttccagcctaagattgaatttttccattctgaccgctgcttgtatggctttaattgaatctccgcctaaaacgaaaaagttatcttttatactgattttagaaacttcaagaatgtcggaccaaacctcactgacgattcgttcaatctcgtttctcggagcaataaagtgatgcagctcggcattattttcagctggaagcggcaaacgttttacatcagtcttcccattgttcgtcaacggaattttatctatgccaataatgactgtcgggatcatatattccggcagatattccaataagtattcttttagctgagaaggcggctgcgtatctttacatactgtataggcatatatctgatcattgtgagcaatcgcaaccgcttcttgaacattgcggtgagacagcagtctgtttataatctcatccagttcaattctaaatcctctgatttttacttgtcggtcgattcttccggcaaattctatattcccatcctcattccacttgcctaaatctccggttttatacattttctcaccagaatgaacaagatccgggataaatttagccttggttagttcttcacgattgcaatagcctcgtccaactccttcccctccgatgtataactctccgataactcccggcggcacaggcttctgctgtttatctagtatgtagatagaacagttttttatcggtgtgccgatagggattctctttatattggaaatattatcctggtttatcgtataagctgcagcatcaacacagcattccgtcggtccatatacatttgttatataaggacggtcattctttttaaatactttatagaaacgctttacttcttcaggtttaagcacttcgccgcctataataaaatgttttacacctatacggccacactgcggagactcagagagcaggctgagataggctggtgttccatcagaaatagttattttattttggatatagaattcagcaagtttcgtgatatcatgcctggcttcttcagagacgatgtaaagagagtgtcctaaaagcagtgcagaaaaaatctgtttgacagaagcgtcaaaagaaaagggtgccaacaacgctacattctgctgcccgccatgtttgcagtagatacgttcatgcagggcttctgttaaattcgctatacttttatgttcgatcatcacaccttttgggtgtcccgttgatccagaagtgtagatgatataggcaaggctatgcccttccgttcctcctttaacattcctcccgtcgtctggaactgtttccaattcattcagacaaacactttctactccgtacctttgaccatgattgttgcgatccgtcagtaacaaacgggccccgctgtctttgagcatatactcaactctttcttgcggatatgatggatcaattggcagataagctgctcctgcttttaaaattcccattattccgatgataaaatcagtggttcggtctgcagctatgcctactgcttcattctttttgacacctttttgaatgagtgctcttccaagccggtttgcatttttgttcagctcactataagttaagcttccgtcttgtgcagacacagctatttgattcggcgttgcttccgcctgcttctcaaaaagctcacagatagatgcatctgtgcctctgcttctcagtgatcttccactgtaactcaatatttcgcgtcgttcattttcttctaaaatgttaatctccccgattagtccatcttgactttcaacaatatgattgaggatcattaagaatcgctgtgagaatttttctacagttgtgcgcttaaacaagtttgatgaataagtgaactcaaacttgatatcctcttttgaaggaaatgcttgaagcagaagatcaaatttggctgttttgttttcataaagatacggcttatatttcagcccatttacttcaattgccggattatccatcagctgaaggacaaacataacgttgaaaagagcattctggtttatatccctctcaaggttcaaatggtctacaagctcttcaaaaggataatcttgattttcataagctagaagcgcattatccctaacggcttcaagcagttctttgaatgttttgtcggcagatggtttatttctcagtgccagcgtatttacaaacattcctatcatgttttctaattctttatgctttcttccggctacaggtgtgccgataataatatcttcttgaccagtaagtttatggagaagcacattaaatgaagccattaaagtcatgaaaagggtgactttttgttttgcgtttaattctgttaacttggcagtcagctctcttcctgcataaaaatagattcgttcaccttgatcatctcgttcggcttctcttgaaaaatctgcgggcagattgagaacgggaatttctcctttaaactcatttaaccaaaaatctttttgttttttcatttcttcagtatgaaataattcattttgccatatcgcaaaatccttaaattgaatgttcaatgacggcagttcgttgccttcgtataaatttatcaattccctttggaagatcgggatagacgccccatccgctataatatgctgtaaatctatcattaaaagatgtttttgatgactaatctcggctaatcctgcacgcagtaaaggagccttttctacatcaaacgggcggacaaaattagacataaggctctctaattcttcttcggaggtcttgattctatccattttaaatcggacgtctttttctatgatttgcacaagctgcccgtcccttaaacctatggacgttcttaaaacctcatgcctgattattaattttttaaacgcatcttctaaacgtttatcgtccaactctccttcaatcattaaaaagaacgggatattataagaagtgctgtttttatttaattgatctagaataaaaattcttttctgtgcagatgaggcctcataccactctaaatcgcctgctttgggaatcacattcacatcatttgtcttcctcagagaatattcatccaaataagctgagaagagttttatattcgaatgctttagcaagtctgaaactgaaagctccgttccttgctgtttattgataaagttgatgatttctattgctatgattgaatctccgcccatttcataaaaatcggatgtaacatcgatcggattgattccaagggcatttccccaaatttgtcctgccattagctctgtttctgaataacagccgtcttccctgccactcagtcttattatttgaggcttgttgactgaagggttatctggtgcattgcttatcggtaatttttcaggcagtttcacccaatgtctctcccgcaaaaatgcgtaacccggcaagctgatttttcttcttttttctccttcatataacatttcccaatcgatctctgcacctttttcatagagcttgcttatatcaatcagaagactctcatctgttctcccgcctgcattataagccttaagtttttttccagcagcggtacttagatctctatcggtcttataagaaaatgcagcttcttcttgctgaaccggcgcttcgagcagactttcaagtttttccttcagatcttcgatgtcttttacgagaaaacacactctattctccagatgttttcttcccgtattcgctgtataacaaagatcagagagattcaaattgttttcttccgagataaaatgaagatactttgatgctatatcattcaggacggacttattttttgcagacagagtgaatacctcttttacctgtctctgttcagtctcacctattatttcaggtgcttcttccaatacaatatgacagttggttccgctgaagccaaacgaacttacaccggctcttcttggcgtctctcctttttcccaatttcttatcatgtcattcacataaacaggtgaattcgaaaaattaattaaaggattcggttcattaaagttgatacttggggggatgaccttctcttttaaagccatgcatgctttaatgagagacgccatgcctgatgccccgactgtatggccgatattgggtttgactgaacctataccgcaaaactgctttttatcggtatatttcttaaacgcattcgttatccctttgatctcaatggggtctcccaaaatcgtgcctgttccatgtgtttcaatataagaaatagtttccggactaatattcgcattcttccaggcacgtgaaatcaatttctcttgtgattcagcattaggagcagtgattccgttagaagccccgtcattattcgtagcgctccctttaatgacagcatatatgtggtctctgtcttctatagccctatgtaaaggttttaatacaatagcagaaatcccctcaccccatgcggtcccctttgcatttttatcaaaaatgctgattttagcgttttccgcttctatttcgctcatcgtacctatattttcaggtctcagaaataaattaacgcctcccgcaatagccatgctgcattcttcatttttaagtgcctcacaagcaagatgaaccgaaacgagtccggaagagcaggctgtatcaacaaccaagcttggccctttcagattaaaaatgtaggaggtcctgcttgccaatatgccgggataagtacctgtcattgcaatcatatccgcatcctttactagggaagcataggaaaacttcaagtcaccgctatgatcatgtccaacgaaaatacctgtattcgaaccttgtaacttgttccccgcataaccggagtcctcaatagcgtgataaactgtctccaaaaacaatctttgtttcggatccataagcatggcttctcttggcgaaattctgaaaaatgatgaatcaaacttatcaatttcatctaagaatcccgctctaaaataagaattctcattcgcactgggcagcaatggatcaatatctttccgccgcttctccggtaagtcccggatgcatgaggcacggttcataatgttttgccagtattcttttgcattattggcttttgagaaacggcaggatatgccgataatggcaatatcaaattgatttttcttggacttatcagataatccttttaaaatgcgcaaagccatttccctgtccattttttgctcttttacttgctccaatacatattgttttataatcgaaatatcatccacgattaatcacccctatcgattttgattctatataaaatatgagaagcatcatggatatatagaatagctgcttcaattgaagcagcttattgaattagttaatttttgtctcaaaaacctttccatcttctttacataacacctgcaccagatttctggcctgtaagacaacactcggaagacctcctcccacttgactccaatgcccaaccatataaaagtctttaagtccgggaagtgaacgtttcagttttttctcgtgcatgatgccttccatctgtttttcccagccctgccagcttccatttctattatttgtgtatcttctgatcgtatatggggtggatacatcagtcacgtcaatatttgatttaatttcaccaaaccatttgtctaattcatcaatcattacattcgcaattgcttttttctcttcttcatatttttcgcggttgtttttttgcaaagtctcccagtattcagcagaagttttcgcatacacgataatactcgttttgccatcaggcgcgaatgaaggattttcgttatatattttcacaaatatgtttttaacgttgtcacagccataggcgttaagaggctgttctaattccagactcaaataatgaggatatttttcaaacgtttttgatacgcccaatccgacataaatttgcggtgcacttgttttaaggttgtcataacaaaatgtcagttcatcatctgtatattttccatccagcatttcaaaaatagttttatagccatccgctgctgaaatgacgatatctccataatgacactgtccgtttttcagctctattccgatcgctttatcattttctactaaaaccttagaaacaggtgatttatattgaatctcaccgcctaattcaacatatctggcttcaataatttttgcgaattgcagagaaccttctacaggatgtcctgaagatttgctattagcccagcctaaagtagccataaagtaagatataggggtatctacattaaaccaaaacagacgatttacattttctcttacaaaactgcttttaaagcgctgggcgaattctttgatcgtcacttttccccattgccccattactttcatgtaagggccagcctttgctttgaaggcctcaaagtctgctaaatcgaacagttcgggcgctttatccaaatccagctctacatcagaaacaactcgaatgccatcagttaaaagcttaattgtttccgcatcttcaggtgcaactcttaaaaactcctgttctaatttatctacatcagcatacagcgtaaatgtatcaccatttctaaagttaacaaccgcaaattcttcatcattaatgaattccatattttgtattacattcagttctttccaaaatttatggaaggtattgttaggtcctgaaccgaccagccagctgatacaaccgtcaaaaaagtacccttttctcttccagccggtacataaaccacccggcagcaagcccatttcaaaaattttcgtgctgtatccgttcatttgcaagtaacagcccgcggccattcctgcaataccgcctccgattatgattgcagtcttgttttcttctgtattcttcattaattttccccttttccgaaactagttttctagaattttcaatccttcttgtatattgattttgccgttctccaggtcgtcaaatagattgttgagttcttgctcaagccgattttcagcagtatcttcttccgtttcttgctgatgatctttattcagctgcttgtcaatatactctgatagctccactacagaggaatatgtaaatatatcggatatatccacaatgtcaggatattgttgatttatcagttttaacagttgggttgccataatagaatcgccgcccatggcactaaagctttcatataaatccagctcttgcatatccaaaaccatagagtacatttgcgcaatacttttttcggtatcagagtaaagttctccctttcctttcagcactatatcttcagtatctgttcttcgacgtttttctgcttcgttttttgtcctgtttttatctattaatttgtttttgatttgctcagataattcaaaagacaattcatccttcgcaaaagcgaggagcttcatatttaatgtacctggaatgatattagtaagcttattcgatgctatttcttctaaaacggaaatagccctttctaccgtcaataatctgaaaatagagctctcatcagtaattccataatcgacagctatgccgacctcatcccaagccggccagttaattgacagcgtgtttttcccctgtttgttttgcatataagcaaaggaatctaaataagcatttgcagctgtataatctccctgtccggcacctccgaaaatagaattaattgaggagaacaaaatcgtgaaatctaaatctacgtctctcgttaaatgattgataacccatgttccattaattttaggagcgagcacttctttaaaaatattagcttcttttctaaagaggaaaccgtccccggcaactccggcacaatggaaaacgccattgatcgtaccgtatttctgttttatttcttcaattaccggctccatgctgtttaagtcagaaacttcacagctgtagcaatcaactttagaacccattgactcgatagctctgatggacttcagttttctgcaaagctttaaatccgttccatcagcaatgatatcgtcccatcggctttgatcaggcagtttagagcgattgagcaatacagcattgacgttatgttttccagccaggtgctttgcgatctccaaaccgattccgccggtgccgccggtaatcatatagacaccgttttctttaatctccataccgccgtgtttcttatcctttatcggttcaaccgtatccaaccgactgatataccgcttaccatccctaaaggcgacttgatagtgtttcccttttgttcttaactcctcactaataatttccggtgaagtatgttcatcaatatcaattgctttacatgaaacattttggaactcctgcgaaataacacgtcccagaccaaacaacgcggcgcccaatggattgattgtattttcttctccggacacttctgtcacaagatcagaaataagatgcaaattaatattgcttttcatcttattcttacttaatccccggactaagcggaacaggctgtatacgcctttattctgcatgtcttctaaatctgttaatgattccgttccttggcggctgatagaagacatatgtataatgctgctgatattttgatcgtttatgctatgcaataattgaacatagtcttcttctgatccgctaattaggaatttccgcccatttatcttctgaaattcatccccaaactccacttcaataacatcatcgtcatgaattttcaactgttccagtatagatttataaatttccatgttgtctttaaataacagtataggacctgttacctctgttttttcttcttcaaaagcttcttgcgccatccattttaattgataaagtgattcagaactttcttcaaaaagggcattaatccgatttactttttttaatacataatcggtgatttctgcaaaaacatttccttctgtatctattaactgaatatcacacagctttgtctctttactgcttgcgttctttttgacaaatgcataaaaatgctgcggcattcttgagtaaatcttcacgcttttatatgaaaaaggaaggaatgtactatcgtcatcatcttctccaataaacacgttcactgcattatctagcaaagcgggatgtaaaaagacgtcttttaaatctgctgtaaattcatcagccaattttaattcggccaattgttcatcagggcccagtatgacttctttgaagttcagccacctcggtccgaaagtaaagactttgctgattaaaccatttttattttcataattgacttttatcttctctctattactgtcattcctaacagagtctaaatcaaacattgatacagagtctgttaatggaaacgcttttccttctgcatgtgtaatccaggtttctccttcctgactggctattataaattgaatacattctttctttttcttaatgattgtgtgtacaatcttattctcatcctcatttactgttaacggagtgaagaagataatatctcgtaattctaattgattgcttttatagtaagcggcacttgctcttcttcccatttcgatataagtcgttcccggaataacgcaagcccccatgattttatggtcacttaaaacccaatccttattcacattaaatgtcgttgaatagatcgtctcattcattgaatcagccaaacactggtcaatcagcgggtgactgatatttttctgatgcggcgcttgacctcttctgtcttttacttctccccagcataatgttctttcaaattggtatgtcggaagactgacaatctttctgcgctcatccttgtacatttttgtccattctacttttgctcctctgacatacaggttgcaaatttccgtaaggtttagcagtaaatattcatccccttcagtaagaatgtcatgtatcaaattgtcagattgagcattcattttgcgatgttcagataaggaaatttctccttcatccataatctgttttctatcagaaccaactttatggaaagaaaaatatacgcctttttctgatatttcattcaggttatgccctgcaagcctgccgatttttctctttaattcttcgtaactttttacaatcagagccaatcggtagccgtaatggccccgccctgtgtttgctgtatagcaaatatgttttacgtttttttgagttccttttttaaagaattcattatattccttgatgagtttcattaaagaattctctgttttagctgataaagtaaatatctcaaatgtttcatttgcaggaatgacctcttcaacctcatctccagcatcttcaatcactacatgtgaattggtccccacaaagccgaaagaactgattcccgctctcctcggtgagttatttttaggccattcatgggctttgtctgtaacaaatacaggtgacttcacaaagttaatcaatgaattcggttctttaaaattaatactcggagggatgacttgatgcttcatagacagaacgatcttgataagtgacgccaaacccgaaacggcaacggtatggccaatattagatttaacagatccgatcccgcaaaactgcagcttgtccgtatattttgaaaacgcattggaaatcccctttatttcaattggatctccaagctttgtgcctgtaccgtgcgcttcgatatattgaatggtttcgggatcaatttgagcattttcccatgcctgaaccagtacttcttcctgggcgatggcatttggagctgtcaatccatttgaggccccgtcattattaactgcactccctttgataacagcataaatatgatctccgtcctgcttggctttacttaaaggttttaagatgactgcagctactccgtcactgaaaaatgtcccgtctgcgtctttatcaaatgagtgtactttatcacttactgattccatcattgattttttggacgttttgaagcgcggaaagaatcctaatgaaattccgctgacaatagacatatcgcattctttatttttcaaagcattacaggcaagatgcacaccaagcagccccgagctgcaagcagaatccaaaaccatagaacttccttttaaatttaataaataattaatccgccccgccatcaaacccggccagttgcccgtcatacttgtcgattctgattctgtaatgtagcggtacaacgtattattgacatggtcttttccaacaaagagcgatgtgttgcttccataaattttgtcccctgcataccctgcatcttcaatcgcagtccataccgtctccagcaatactctgtgagacgggtcaatggcctttgcttctttaggagaaatattaaaaaattcaggatcgaacttgtctacgtcttctaaatatccgccaggtttccagttatctgcttgttcttccgtcagatatcctgaaccgagaaaatcagtaaaccctttattgtttacgatcggtttaatgtaattgatcatatcttttggatattccgctttgcagtcttctccattcatcagattctgccagtattcatctgtattgtttgctttcggcagtctgcaggaaattccaatgatagcaatatcttcattgctgcttgcagcctttaattcttttagcattcgctttgcttctttctggcttagcttatgctgtttcacttgttcaaatatataagattgaacgctattcattacggatcactcccgctttctttctaagaaaatttttgataggaagggtaataagatctacatttttaccttaaaatggaattcagttcccgtaataatgtgataggataggcaggctgctttttcttcattcaattcgcagcctgccaatatccattttgcgaatatattcttacaggcccaattcagttattttcggtctggatgaaatatttgatttgcttcgctgacttccatctctccggatgccagcttattcaaaattgcatccaggtcatcttcattgtcttcttcagggattcggtcagaagacttctgatcactgaagtgggattcaaggtaggttgacatctccttaatggagggatacgtaaaaatatcagaaacatcaatgagagaaggccattctttctctatttcttttaccagatatatcgcggatattgaatctccgcccaaatcataaaatttatcagttatactgatttgttctaagcctaaaacttttatccaagctttcattagtttattttcaatatcgctgaagctaaatgtctgatcggttttcgactcaacagatttttttacaatcgcctgctccttaaaagtcaaaatatccggagataatcggaaatgaatttgatcttgatttaattccagtacccgatgatcaatttccccgatgatcacattccggatgtccttttgcatgacttcatcgaaggcacgtatcgcttcagctgaggtaatcgtcttaaagccgttttcatctttatgttcgtttccggccttttgacgctcttcaatatattcggcaagcatgcccacatccgaccagccgcaccaattaatcgtaactgttttttcatccggtcttcttcgctgtctgcgttctgcaaaggaatccaggtaggcattagccgcagtataatcagcctgccccatactccccgcaagtgctgtgatagaagaaaacattatgaagaaatccagatgctcatgctttgtcagctcgtttaatatccatgttccattaactttcggtctgagcacgttatcaaacacttttttttcctttctgaaaataaacccatctccagaaacaccagcactatgtatgacaccgtggattgtattgtatttactctttatttcctcgaatacatgaatcatttcactttcatttgcgacatccgccttatagtaatctaccttagaaccgctttcttttatttcttttagagcatcgattttcttgttgtttcccttctccatgttgatctgctgctcggagcgtccaatgaggattaattggacattttcttttgatgataaatacttggccatttctaatcccagtccgcccataccgccggtaataacatatacaccgttctttctgatgcttattttcccttcccgaattacggataagtcttcagtctggagctcttgaacgtatttatgccggtctctgtaagcgacaagctctgactgtttttttgagttgatttcaaacaagatgctttccgccataagattttgatccaaatctatgcatctgacacttacacgcgaatattccttttcaattacttttccaaaaccgaaaaatgccgcgttatgcgggttaatgtctggttcttcaccgcttacttgatgtgcaaggtctgcaaacagcatcagttctatgttattttttgtattttctacaagtgattttgttaaataaaataaactgtctacccctgaggatatttttttctgaagctgatatatgtttttgtctttctcattgctgatagacatcaaatggacaatctgagaaaccttttcactttgaagagcttttacaagacagtcataatcttcttgagaatcactgacagtataatgatggcttccgattttagagaaatagtcaccctgttccgcgacaatcacagttttcccttccagttctaaccttcgaatgatttcctcggataaactgcagccattattcttaaataataaaataggatgatgaatttctcgcatctcgtgtgattgatcgctttctcttatccaagatagcttatgatatatattgtttcttttagtcttttcagctgctttatgcaccctttttacgatgtaattgttgatttcaccgaaaacttctccagtgtcattcagcaggacgatgcgaaacgttcctgtttccccgttgcttcggctctttttcttgatataactgtaaaactttttagaagcagagccataaatcttaaattctttataaaaataagggagataggtttcgttatctattgtgaatgtcccggcattaacggcacaatccatcatcgcaggatgaagcgaaaactgaacgaaatcactctcatattctttcggcaattccaattcacatagaagcctgtcgtcgtctctgtagattgcgttggtgcatttccatctgcctccgacttgaacgatgctttccggtctattggtatcttctatatgataaaccgacttgtattcatcggtgtttatttccgtcaatggatgattattacgttgaatgacataaacagaattaaagcttttctttaaatcctcaatgtcatatgtttcccgtaccggttcttctttcgcaatgaccgcttccgcgtgttttatccatttatcgccggtcttacttatcacactaaactctaaaacgctgtcctttttctttatgatcgtatgaacttctttaacttcatttgcttttacctttaactgatttgaaaacgtaacgtcttttaacagaatgccgacaggttcgccgaagtattttcttcccgcttctctagctgtttctatataaaccgttccagggataacgtaagaatcattcactttatgttcatttaaaaaccaataatcagtgacattcaaatgggatatatacacttccagattcagtgactgcactgcaagattgctcaataaagattgttttttctcatcggctgaagggccgtctgcagccagctcagcccataatctttttccgctgaatttgtatgtcggcaagctgaccttttgaaaattcatctcgctataaagatcttcaaagttaatattcgccccatcacaatacatttcacataaaatatgtaagtcagaggttggaatattagagacgtcttgtctgactctttgaatcacattttttattgtttgagtattctgcacactgtctgtatgcgtttttcctataaactttgtttgatttgttatcgattgaaagtatatatttttctcccgatacgttttccattcagagcatgataaaaactccagcttttccagcagttccgcgacagagcttattaccatagcgagtctgtatttgtttggcaatctcccagtgtttgctgtataacatatatctcccagattcacatctgtttctctctttaaataatcaatatgatctgtaagcaagtgcgcgagagatgttttagtcctagctgatacagtaaaaatatgttcagataaaacggattgatcgactttttcaactgcgggtgcctcttctaaaatgacatgacagtttgtaccgctcagcccaaaactgctgatgccgcacctgtatactccgctgctctcccatgctgaaacggagtcattgacgtaaacaggcgattcatgaaaattgatatttcggttcggcactttaaaatgtaaacttggcggaatttttttatgctttaatgccattaccgctttaattaaacccgctattcccgccaaactatcaagatgcccgatgtttgttttgactgaagatactgcacagaactgttttcggtctgtatattttctgaaagcccgttgtaacgcatttatttcaatcggatcccctaatttggtccctgtcccatgagcttcaatatatgtaattgttttaggatctatttttgcatttttccacgcatctactattacttgttcttgagctgctgcgttaggagcggtaattcctactgagctgccgtcctgattaacagcgctccccttaatgactgcatagatctggtcatgatcacgaatcgcttgggccagcggcttcagcaatacggcagcgactccttcgccgctattcgtgccgtcagcagaatcatcgaaagtccttacagcaaaatcagatgaagaattcccgatatttaacctgctctcctctattgtctttgggaatacttttatattcactccgccggctaatgccatatcgcaatccttatttcttattgcctgacaagccgtatggagggcgacaagcgatgaagagcatgcagtatcgattaccattgctggccctttaaaatccaagatatatgacagtctgcttgcgataactgatttaatgttacccgcggtagccagtccgagtaatgattgatctcctttttcaagcaatctgaagtattcatttgagccgtcactgctgagtccaatgtatactcccgtatttgtcccacataattttccgccgccgtaacccccgtcttccaatgcgttccaggccgtttcaataaataatctttgtctgggatcaatcaactttgcttcatttggaaggatactgaaaaagtcacaatcaaatttatcaatctcatccatataggctatttttgtataggctgcatctttactgtacttggttccgctgttttttaatgactggtcagcatctttttttctgttcagaggaatgtctctgatgaactcttttccttgtaaaagtaaatcccaatattcatttacgtgattggcttcgccgattctgcatgataaaccgacaatggcaatgtcatctccggaaatgtctttggtcccttcctcgtttttttgtttctttacattaggagtttgatttgtaaaagcggccgcttttaagttacttaaacttataaagtctgttttcatttttttacctcgctgagaatcactagataggtgatcatacctgtcaaacttcaaagtcttcaaagtgtttttttgtgtttgtttcagaaaataattgattaaatctttttttctgttcatttataggggttttttttgttcgaaacactgacttcagcatttctactgccatatgcatttgttctcttgacggctgacgacctgatgtttcaagttcagcctgtatggcagctactttttcatatggttcgattacacctttggcgtattcctcattgttccagttgtaatttttagtagcaaccgcgatccctaaacttctcgagataatagaaaaaccggcttgcagtgaaacagattcgttcaaaagagtctcttttataatcttcacgtcctcttctttgtcgtagctgtacgatttgatgtcagcgatattgtttcttacaagattccttaatacagatttcggcccaaattcaatcacagtatcagtatgatttgcttctaaatacttcatgattcccatccaatttaccggttttacgatttgagttcccagtatgtcagccatttgctgtttatctgaatatggaagagccgtcacattagataaaactttgtattttggagttctgagatcatacttttttaactcatggctgaatttttccgcagcaaaacccatgatcggagaatgaaaagcagcacttacatttaatttaaaaatgtctgctcctctggctttaagagtttcactaagctcttcaactgctgccgcttctccggataccacaacatctttatatccattgtagttagaaacagcaatcgtttttcctcttgaagagagagattcgcactcttcttctgctattctttcatccaggttcctgataacagccattgctccggtcccttgttcggcagcttctttcattaataatcctctggctctcaccagctttacagcgtcctggaaatccaaaacgtcactgcaaaccaaggcagaatattctcctaaactatggccggcgatatattcaggttcttttccgacctcttccatgtagattctgaattgtgcaatacttgttgccaggatggccggctgagtattttctgtttgagatagctcagcggcacttccatctatacataatttcttcaggtcaaatcccaatgcatcactggcttcgtcatacgtttttttagcgataataaaattgtcacataaacgtttgcccattcctgcatattgagatccttgtcctgaaaataaaaaacctattttcgacatttaaatacctccaaagtccctataatgcctgatttgccttacattctgccgatcagcaaaatgtaaggcagaaccggccgctttatattgaattgtctgctttgtctgctgtaatcacttgaatcaaattcatgtagttataaaataaatctttcattttgtgctcatttagtttctgatggttatatataaaaacgatttctgcttcggatggcttttcatgaactgcaaaaaccagatcatataattctgagtactctttttttgattcattactaatataaaaaagaggaaaaacatcttgggccgaacttgatttcttatagtgagtattcaaatcgtattgtgaatcctcttgattctcaatctgctccttcgccatacgaataatatcgtgaaaattctcgatatcagacagatcaaaagacagctgactcatccgatcatctccatgacccgaaaattggatatgaaccaagttttgctggctgacatcagctaataaaaatacataacccgctaataaaacatgagaaatatcatatttgtaggtattgcatattgtttttaaaccatcataataattcgcatttaccgcatattcgtgcatggctgtatgactttgtccagttgattccgagatgtattcaagcggtaaagtaataggaatgatttctttttccaaggacactgctatctccgcaaaggctatagctgattctatatattcggacaatctgtaaatagtcggatatgcaaacaagtcagcaatttgaatttgttttggatacagcttctgaagctcattataaactgcaacgattttgattgaattaccgcctgcttcaaagaagttatcatgtattccaggctcttctatttttaaaacatcggtccaaacacggctgatacttttttgtacatccgttaccgcttcctcaaaaggccggtcaaaacctgttctatctataacaggttcaggcagtgccaggacatttatttttccgtttgctgtcagcggaatttggtcaattttcataaagatctgcggaatcatatactcaggaagcacaggtgataataacttaataaattctgaaggatatacagtgctttctgccacataatacagaactaaatcttggactcctgcggaatttgtttttccggcagctacacattccttaactttttcatgttggtttactatgctttcaatctctcccaattctatccgataccctctgatctttacctgattgtccattcttccgataacgtccagttcaccatttggcagccaccttgctaaatctcctgtcttatacatcttggttcctttaacaaacggattgtctacaaacttttgcgcagtcaaatcttcttttcctaaatatcctctggccattccggctccagcaatgcataattcgccagtactgccgagcggtacagtgtttccatcatgatctactatatatatctgtgtattcgcaatcggcttgcctatatttacactattttcattggttaagtctttcacagaagaccaaatcgtcgtctcagtcggaccgtacatattatagatcttcagatttttatatttttttagctcaaataacaattcccgttgaaatacctcgcccccaaccatgatggtcttcaatttctgaagactctccgtactgttttctgcacttagcatcagctttaatctggatggcgtaagctgaatagtattgacatcagtctcaacaacgatcttgtttaacaagtacggatctctttgttccgcttcaccggctatgacaactttcagcccttgagttaaaggcagcagcgactctaatccgaatatgtcaaatgagcacgtggtgaccgaaagaaggacattgtcttgtgaaaagctgatcctgtctgttattcccttaataaagttatgaacggcacggtgctctacggcgacccctttcggttttccggttgatcccgacgtataaatgacatatgctaaatcttcggccctgttaataacatcaatgttcgtctccaactgatgtaataaatcctctgaatctatgttaaatatggttccgctgtacgttaattcatttggaagtccttcttcagttaacagcaggccgcttttactgtctttcagcatataattgatcctgtctgccggataatcaggatcaagcggtaagtagcatccccctgcctttagtattcctaatattcctataatcaatcggaaagaccttcttaccaaaataggaaccacaacattctctttgatgccgttttccctgagggctcttgccaattgatttgccttattattcagctccttataggtcaagaagtctccgttccattccagagcgattgcatcaggtgtccttaaagcttgctcttcgaagagctcttgtaacgtcttttctttcttatatgataattccgtgcagttgaattctttcaccagcttttgtttctctgtctcatttaccatatcgatctgagaaactattacttcatgatcagccgctgcctgctgtaagatgctaaccaggttatctaagattgaacttaccgtttctttactgtaaacactggcgttatatgtgattttcatatgcaagtcgtcaccgggagcaattaaaagctctaaatcatagttggtttgttcaaacccatgttcagcagttatttttacactcgaacgggctgaatcttggaaaagatcctcactcaacgggtaattttcatacacgactacgtgattgattaatttattcttcatacttgtcaaagactgtatgtctgccagagaacaataactgtattcgttcgcttcaataaagtctttatttatttgtttagccaatgaaataaatgatgtatcacattctcttttcactctgattggcactgcatttataaataagccgaccatattttcaattccgtttatctcactcggtctgcctgaaacaatggaaccaaataccacatcatttgtattgttatatttctgaagcaatatcccccatgctgtttgaacgatagaatttaatgtaatgctgtttgactcagcgatttttttcagcttagcggcggtttcaccgttaagcgctcccagtttttgatcatgctgatactcgtcagatttcaattccagttccggaaatgagatctcttgttcatatgcagaaagatattccttccaatattcaaatgcacggtccttgtcctgctgatcaagccattcaagataacgactgtacggtacaggtgattcttgaaggagttttttcccttcagccacgtcaccatatagatccataagctcttttaacaggataccgacactccagccatccaaaataatgtggtggaaactgtatatgactttaaatttatttcttcccagcttgatcaccgatactctgatcagacaatctttgttcagatcaaacggagtattcctgtctctcaccttgaattgccctacaaaggcatccttcttctgctcctcccattggctgatatcatgatattgaatgtttagttttctttcttttaaaatggcttgtttaaatacacggaaaccgttatagaaaaatgacgttcttaatatttcatatttagcaatcagcctgtttaatgcgtcactgagaacttctgtattcagatttccttcaactgttatttcactttgttcgaaataagcgctagattgatggtcaatcacagcgttatacagcatgccttcctgcatcggtgaaagagaatgaattttttctacttcagcaccgcttgcaagaatttgatttagctcctctatttgaagatcgggatccccataatcccatggagttttctcagatattttcttattcacacaatgttctatgatctgatttattttcaattgataggctttcgtaaattgctcaatcgtctctcgtttatattggtttgcactgtaattgaacgtaaacatcagcctgccatccatgatatatccatttatttctatactatgtgtctttttatttcttccagatatgctcgttccggcggacaaaggtgatatttgaaataggttgctgcgatcttcttggccaaattcacccaagtagttaaaactgatatcaggttttaattgaagatgaaccgagtccgacaaatatctgagtattccgtaaccaatcccgttatgggggatatgtctaagcatttcctttgtatacttaatggagcttgataaactattactttccgtcatatcgagaacaattgggtatattgtcgtaaaccaacctattgtgcgatggaccggggtttttataacactttcacggccgtgcccttcaagattcacaaggatcttctcgttgccggtccattctttggctgcaagtcccagtgagcaaagcaatatatcattaatttgtgtatgatatgctgcatttgtatttcttaaaagtgtttttgtttgatcctctgttaattcaattttaatttctttactatcttcataagagcagctttcggcaatgaaatcctttggaagaggttcaataatagccgtttctatggtctcccagtacccagcttccttttgaagagccttgctgtttgcatattctttcaattgacgcgcccattctttgaacgatgctgttttagtttccagctccaccttgttcccattaactgtttgaagataagctgtttcaaaatcttccaataggattctccaagatactccgtcaatgatcatatgatgaatggttaatagaagatgatctccgtttttggttttaaataccgccagttttattaaaatccccttttccaagctcaattcgttctgcatacggtcagccagtgattcaattgccatggctggatcttctgtttgtgtcatatcaaatacttctaaagtaaatgtttcttttgcctgtttaatgcccctattccattgcttaatttcaccgttttcctttttaaactgcatcctgagggcatcatgatgcctcaccagttccaaaaaggccgtttcgattgctttttcttctatgccggactttttgtaaagcataaaggcttggttatagtggttttcttgttcaaatctctgttctataaaccatttttgaatcggtgtcagatcaacgtctccttctacaatcgactgatctgcttgtatatcagctgattttacgtgagcactcaagtcttttatgtgcggatatttcattaaatctctgacttccagttttaagccgtatttttggagttcggaaactactaaaattgatttaattgagtctccgccgatctcgtaatagttatagttaatcccgattgatttcatccccagaactttctcccatacgcatgcgagaatttgttcctttttatttcgcggtgcttcatatgcagactccaatacatccgcaatatctataatcggcaatgatttcgtatctatttttccgtttgaacttaacggcattttttcaatctggaagatataacttggcaccatatataacggtaattctttagacagattttcttttaaagcataaacatctatttttttgtcggaagtaacataaccgcagagatatttatccccatgttggtcatctctcgctacaacaacagcctctcttatgtgactcattttcagaagccggttttctatttctcccgtttcaatacgatatcctctgattttgacttgatcatcaattcttcctaaataatcaattgtcccgtccggcatccattttgccatatcccctgttctgtataacttagccccgggttcaaaggggttatctacaaatttttctgacgttaagcccgctttatttttatatccgtctgcaagtccttctccgctgacacaaagttccccggctgcccctaaaggaagtaattccaattgttttcctaatatataaagcttagtattatccgcaggtttgcctattgatactgcattgccattgtctctttcaatatgatattgatgaatcatacacccgactgtagcctctgtcgggccgtattcattgtagattttgacatgaccgttaaatgcaccgtgtatcttttttgcaagcccggttttcagctcttccccgccgacgattattttttttatctttgacgtacttaaatctacattctccagcaatctcaaatgcgtcggcgttagcttaataatatccgctttattttcttctataattcttctgatcagaagagccttgtccggtccctcataaataataattttatttcctgaaataagcggtgtataaattgaagtaaccgttaagtcaaaagaaatagaagaatacagaggaaaatcaatatcttcatcatttacatatatcttatttgcccaatgaatataatttaccacgcctttatgttttaccatgacgcccttcggcagccctgtagtccctgaagtataaatcatgtaggcaaggtcttccgggcaactgacattcggcagattacttctgttatgcatatatagagtaggatcacttaatgataaaatttctttattgaatgtaataccacctgacaatccgttttgaattaggagaatgtttgcatcactgtctttcagcatgtaatttactctttcatcaggatattcaggatctatcggcaaatacgctccccctgctttcagcaccccgataattccgatgatcatctcaagagatctctctgtcatgattccgacaatgctgttttctctaattcctttttgtctcaaaagattagccaggctgtttgatttctcgtttagttctttataggttaatagcgtatcttcttggacagccgcaatacgttcaggtgttttttctgcctgctcttcaaataattgatgaatcgttttattccgaggaaattcagctgccgtgtcattgaatatatggagcaatgtgtgcttctcctgttcaggaatcaaatccagtttcattaaaggttgatctaggccggcagctgcactttgtaaaagcttcgtaaaatgggcacccattctctcggctgtttctttttcaaataattgactggagtattccaagtggaacttaattcctttatcaatttccgtcgcggttaacgttaaatcgaattttgaaatattgatctcggtttgaatatgctcttccggatttggatccaagtgattttcaataccgtaatctgcattttcaagtacaaacatgacatcaaacagcgggttccggctcgaatctctttttaccccgagtttttgaacaatattttcaaattggtaatctgtattctcaaaatcttttaacgtatgatgtttgacctcttctaaaaacgctctgaatgttttatgttcctcaggaaaatttcttatggcgacggtattgacgaacatccccaccgtattctccagttcggtgtctgaccttccggactctgccgttccgatgatcacatcctgctgaccgctgtattttgaaagcatgatattatataccgccagcagcaccatgtacaaagttgttcctgtttctttcgccaccgactttaagcttgatgttaacctttcatcggccgtaaagctgactcggcttccttcaaagcttttgactctcggccgctcgtaatcagtctgcagattgagaatcggcagatctccgcttaaccgcttaagccaatactcctcttgttcctttaacgcctcttttgttcctgagcttacttgccattctgaataatctttatattgcagcggcggctgttttagtttatgacccgcatacagcgcattgaattctttgcggattattccaaccgatacaccgtccgcagcgatatgatgaacatctaacagcagcagattccggtcttcatacgttatgagtccggctctgattaacggtgctttgtccaaatgaaagggtctgataaactgcttcacatatggtcgtatcccatcagacggcagcttctgataattaaattcgagctcccatgtatcgtgaataatctgaaccacatcgccgcttacaacatcgaaacttgtccgtaacgcttcgtgtctgccaataatctcttgtagaactgattcggcttttttcacatctaattttccgtttagttcaatcataatcggcaagttataaacgatactgtctttatccgtctcccaaagggcaaacattcttttctgagcagatgacgcttgataagaagactgctttctcgctttactgatgaccggataattctgtttatcccgcttttgaataagacggctcaactgtttgatggtaggctgctcaaaaagctccttcacctttatatccgtgccgaatgtttttctgatgcgggaaatagtgaacgcagctgttaaagaatgtccgcccagttcgaagaaatcttcatttatactgatccgtttatgcccaagcatttctttccaaatttcagctagtttttcttccgtttcatttgccggagcttcgtattgaggtactgacaaccgttgcaagtcaggaagaggcagctcttttcgattgatttttccgttagctgtaagaggcaactctttcagttgtattatgaaactcggaatcatatacttcggaagaacctgtgccaatttctcctgtacgaacgagccttccatctcaatgtccccagtaatatatgcagaaagatatttctcctctatataaacaaccgccgcttcttttataccttccagctgtaatagttggttttcgatctctccgatttcaactctaaaacccctaattttgatctggttgtcaatccggcctaaaaattctatatttccatccggcatccatctgccaaggtctcctgttttgtacatttttgctccacgatgaaaaggattatcaataaatttttcattcgttaattcttcattattgacatatcccgatgctaaacctaccccgctgatacaaatctcaccaggtgctcccacagggaccagttgatctgaacgatccacaatatagatattaataccgtgaattggtcttcctattctattgtatatttcacagttttgaatatgatctagatcaatgctatgtgcaatacagccaacagtgctttcggtcggcccgtaatggttaataaacttcatccatctgcatttttcagcgagctttttgacgttgccgatgtttatgctttcgccgcccagtataataacttttaaatcaggacaagacgccagcatgtcaacatcctccatcaatgttgaaaataaagtgggtgtcattttaagatatgtaatactatttttatgaatatattctattaatgatagagagtgaagatacacttctttatcaacaaagtggacttgtccgccaccggataaaactggaaatatactggtatagcataagtcaaaactatattttgacgtcactaacgacctgctgtcagaatttatgtttatttgatcacatacccataatgaataattaactaatgatttatttttcaccttcacccccttcggttttcccgaagtacccgaggtatatataacatatacctcgtcctcgagatcatactgaacatcagggtttgatgtattttggctggtataaatcgatttatccgtaatatccaaacattccgccgcaatgtttttatcagctaaaaagcacaaatctgtaatgaggatatcagctttgctatcttttaaaatatgatttatccgactgaccggtgattcatcatcaataggcagaaacgcacttccggtttttaaaattcccagcatcccaatcattgaatattctgaaggacggatcatcatagccgtaatgctgttttttcctgcccctttttccattaataatgttgcaacttgatttgccttttcgtttagctctttataagtgatatgctttcctgcatagacagccgctgtttggccaggtgtcttttccgctcgttcttcaaaaaggtcttgtatcgttttattcaccgtataattagaggactgcttattaaaatcctggagcattccgcgctcttcttcatttacagcgctgatgtctttcaggacacgcgtaggatcagttgccacttgctttaacacatgacagaaattaacacctatacgattaatgatatcttcacgataaacattattgttatacgtcatctctgctttgatttggctgcctggaataataaccagcccaaagtcatagttcgtctgttcaaacacttccatatctgtaatccttaaagcatcagttgtattatcgaccgccttgccatagtcatcaacaggataattttcataaaccaacatatggttgatcagtttctctttcatctttgtaagagcttgtatatccgctaaagaactgtaaccgtatgatgtattcgctttgataaagtcactgttcagcttttgggctaatgctataaataccgtatcaccatcgccttttactctcagaggaaccgcattgataaataaccccaccattttttctatgccttgcactctgcattgtcttccggaaataaccgcaccaaaaacaacatcatccacgttgttatacttctgcaaaagaactccccatgcagtctgaatcaatgcacttaaagtaatgtgatattgatcagctgcagctttcaacatcgaagtacatgtttcatcaataatgaatgttttcttcctattattgaaaccgccctcatcagcagaactttggaataccggcttgctgctcatattcatttagataatccccccaatattctaatgcggcacttttgtcctgattatccagccattctaagtaggtgctgtaaggctcggtatgctgaagcactgtctctcttccttcttttaatgacgtataaatagtttttatatcattcattattaaactcatacaccagccatccataataatatggtgaaaactgaacagcagtttatattctttctcatcagtttttaatacggttactcttattaagcaatcattcgtcaaatcgaatctcgttcccctgtctttaaactggacatttttaagccggactttcttttgatattccgagaaagtgctgatatcttcaaattcaattttaacttttctctctcttagaacagcctgtttaaacttacttaatccttcatgaaaaaagcatgttcttaaaatttcatacttctcgatcagcatattaaaagctgtatttaatctgccaatatcaagctgaccggataaagaaaatgtaagctgctcaaaataggcttgtgaaaacggatcaagcaatgcatgataaagcatcccgctctgcataggagtcagggagtggattttctctatctcttttccgcttgataaaatctgctccaaatctccgatggataaatccagatctccatagtcaaagggtgttttttcaggaatttttttcattccgcaatgctgaataatatcgattaaccggtttatataggattcggttaatgttttaattgtttcttctttaaactctttcgtactatagttaaattccaactgcagttgaccgtccataataaagctgttgatttcgatggcattcaattttttattagataaagaaacacttgtaccagatgatatatctgcatgctgaaaaacagcccgctttttttgagagatttctcccagatagttaaacccgatctcaggctttatcgtaaaactgatgtcttttttatgtgccggtgccgtcaagtatttaataattccgtaaccaatacctttatgaggtattcttcttaaatactctttcgtattttttatgcaataaggcagatcatcactgtgctccatatccagcacgatcggaaatagtgaggtgaaccagccgatggttctttctattgaaatattttctaatatgttctctcttccgtggccttccagaccgattaaaaccttgtcaagtcccgcccattcttttactgccattcccagtgaacaaagcaagatgtcattaatctgtgtgttataagctgcatttgtattcctctggagcttatcagttaactgctttgtaagactgacagtaatggtgcggctttccttaaatacactgtcagttttattgaaatctctcggaatttctttaatcttcgttttctcgatattctcccaataccgaagttcctttcttatctcacttccgtttgcatattccgccaatttacgtgtccattcttgaaaggatgccgtttttggcggaagaacggccggctctcctttttgcagattgttgtagacctgctccatatcttcaagcagaattctccaagagactccgtcaatcaccatatgatgtatagcaataagtagataatcgcccctcattgttcgaaataaaccaagtttcattaaaagtcctttttcaagatccattccgctttgtaactgatcggcaagtttttctattgtatttttgtaatccgtatcagcaagcagatcatatatgtccagagtaaaagtatcccgggcggcttggacatctctgacttcttgttttatttcgtcattttcggctgtatatatcaacctcaaagcatcatgatgctttactaataattcaaatgtctttgccagagcgtgttcattaattttttctttcacttgaaacatgaatgcctgattaaagtggtgaatgtccgcaaagtcattctctataaaccacttttgtatcggtgccagttcagttctcccgctaaccgggctctgatctgtttgagctttatataatttcacgtgtttactgaggttttttatttgcggatactgcaaaagatcttttacctctagactgagactgtatttttgaagctttgatacaatcagtatagattttattgagtctccgcccagctcatagtaattatcattaataccaatatcatcaattttcagaacttccgaccaaacatttaccagaatctgttcgacttcggaacggggtgcttcaaggtgctcctttatatgtttaggctcttctatttctgcaagtgctttcctgtcaattttcccatttggtgtgagaggcagctgttcaacctggatgatgacaccgggaatcatatattgcggcaaaatgtcacccaattgctccctcaaagctgctccggatattttatattctgcggttacaaatgcagaaaggtatttgtcaccgtgaaggtcgcacttatctataacaactgcttcttttatcccgcttattttcagaagctggctttctatttcatcagtttcaatccggaagcctctgattttgacttgattatcaattctccccaaaaattctatgtttccgtcaggaagccaccttgccaagtctcctgttcggtacattttagttccggactcaaatggatgatcaataaacttctcacgcgtcattttctctttattgagatatcctcttgctaagctgtcacccgacacacacaattctcccgctaaaccaataggcacaagattgttgttgtgatcaattatgaaggctttcagatttctgatcggcttaccgataggaatggtctttgccatcgccctctcagcttctgagtatctccacattgtagagcagattgtcgtttcagttggaccgtaggcattaatatagtctattttattcacgatccggttcaaggattttgtagatatctgagaaccagcagtaattaagagccttaaagctgataatccgtttatatttatatggttgatgtatacaggcggcaaagtggctacagtaatgtcatgccggttaatatactcttcaaataatgtataattattgatgacttgacttgaaaggatgtgtagttccgctccggtcaacagtgccatactgatttcccacactgatgcatcaaatgaaaaacttgcaaattgaataattttatcccggtaattgatattcatatcatgttcaaagacacttttgagattactgattccgatatgccggatcgttacaccctttggttttccagtcgttccagaagtataaatgacataagcaagatgttctgcggaactcatcattggcaggttatgccgatctccggtgtaaagagaactatctgttaaatcaataaccttcccgtcaaacggaatattgtcagcctgactattctgcactaataaaatgtcagaaccgctgtcttcaatcatgtatttgattctctcagaaggatatcccggatcaattggcaaaaatgcgcctcccgccttcagcacacccaatatgcctaacaccatctctaatgatttgtcagcaacaatacctactattgactcttttttcacccccattttcattagtattctcgccagactatttgatctttcgttaagttctttataagttactttattattttcatacactgccgctattctttccggtgtcttttccgcttgttcttcaaacaattgatggattgtcttattatgcgggaagtcggctgctgtatcattgaatacataaagcagtttatgtttctcatcatccgttatcatattcagtctgcagattgccgtgtccggttctgatacaacctgttgtaaaagccgggtataatgagcacccattctttcgactgtgtctttcctgaataaatgattgcaatattccaattggaagttaacgccttcatcggtttccattgcagttaacgttaaatcaaatcttgatatattgacctcagataccagtaaatttgattctgctgtctcttcatttcctccgaatccgtaatccttactctcaaaagtaaacatgacatcaaacagcgggttccggctcgaatctctttttaccccgagtttttgaacaatattttcaaattggtaatctgtattctcaaaatcttttaacgtatgatgtttgacctcttctaaaaacgctctgaatgttttatgttcctcaggaaaatttcttatggcgacggtattgacgaacatccccaccgtattctccagttcggtgtctgaccttccggactctgccgttccgatgatcacatcctgctgaccgctgtattttgaaagcatgatattatataccgccagcagcaccatgtacaaagttgttcctgtttctttcgccaccgactttaagcttgatgttaacctttcatcggccgtaaagctgactcggcttccttcaaagcttttgactctcggccgctcgtaatcagtctgcagattgagaatcggcagatctccgcttaaccgcttaagccaatactcctcttgttcctttaacgcctcttttgttcctgagcttacttgccattctgaataatctttatattgcagcggcggctgttttagtttatgatccgcatacagcgcattgaattctttgcggattattccaaccgatacaccgtccgcagcgatatgatgaacatctaacagcagcagattccggtcttcatacgttatgagtccggctctgattaacggtgctttgtccaaatgaaagggtctgataaactgcttcacatatggtcgtatcccatcagacggcagcttctgataatcaaattcgagctcccatgtatcgtgaataatctgaaccacatcgccgtttacaacatcgaaacttgtccgtaaagcttcgtgtctgccaataatctcttgtagaactgattcggctttttttacatctaattttccgtttagttcaatcataatcggcaagttataaacgatactgtctttatccgtctcccaaagggcaaacattcttttctgagcagatgacgcttgataagaagactgctttctcgctttactgatgaccggataattctgtttatcccgcttttgaataagacggctcaactgtttgatggtaggctgctcaaaaagctccttcacctttatatccgtgccgaatgtttttctgatgcgggaaattaacatagaagcctttaatgaatgaccgccgatttcaaagaaattttcatctataccgacgcgttccctgccaagtacagcttcccaaatctccgaaagttttttctccgtttcatttgtcggcgcttcatattttgtttcggacatttgagatatatcaggtcgaggaagtgcccgtctgtcaattttcccatttaccgtcaaaggcatgttatccatttgtttaaagtacgatggaaccatatattccggaagaaagtctctcagaaagtgctgcaattcaatctttgcgattttatgatttgaagtgtaataagcacagatatataaatcatcatcaccattatgatttactgttactgccgcttctttaatttctgtatgattgatcaatcgggcttctatctccccaagctcgattctaaaaccgcggattttgacttgctcgtcccgccgtccgataaactccacatcgccattttctaaataacgcactaagtctcctgttttataaagacgtgctgaaggatcattattgaaagggtgtgatataaaccgttccttcgttaaatcaggccgtcgccaatactctcgcgccagcccatctccgccaataaacagctcaccaggaataccaggcgctaccggttttaattgcgaatctaaaatgaatatttctgtaccagaaataggcctccctataggaagcgtactgcctttccaatcatgagggaccgggaaacaacaggtaaaggtcgttccctctgtcggcccatatccgttaattacttgtacctttccaagtgctaatactttttgaacatgcggaacggaaaccacatctccgcctaccaataattgctgaagcccttttaatgattctaactgctgatcaactactagagaaaataaaccggccgtcagccaaagagtcgtaatgttatatttttttacagcttctgcaatatcatcagccgtcggtattcccggaggcattatagccagacatcccccattcaataaacagccccagatctcgaaggtagaagcgtcaaaagcggcagaagctaattgcagaaacgtttgattctcatcaaataccgcataatcagtctccttcaccagccgaatcacaccgcggttaacaatacttactcctttaggcagtcccgttgagcctgacgtatacatgacataagccaggtcatccaaggaaccttttatgccaatattagatccatccatcttttcaatttcttctttcataccatccaaacagattacgccgtccccgtgaggcgggagttgtgactgaatgctttcgtttgtaatcagcaactctacacctgaatcttcgattaagaatgatagtctttgcttcggatattgagggtctaacggcacataagcaccgcctgactttaatattgccagaatactaatatacaaatcaaaagagcgttctaaagcaattccgacaaggtctccccgttttactccgcactcctgaagataccgtgccagctggttcgcacggtgattaagttctgcgtaacacattgaagagttttctagtaccaaagcagtcttatccgaatattcatcagcctgctgctcaaacacctccgaaattgttccaattttcgaataattatcttcccagccaaagattttcttttgcttatttttttctttcaggaatctcatatctttcactctgatattttcaggagttatcatagcttcaaggatcatctgaaatcgcagtgacaaatcttttatcatattttgagaatagaggcattcgttatagtgtatggctgtctctatgtattgtttctggtttataaacgaaaataggatatgaatagcgggattttcttgattaagtatgtattcttgaatattttcaaggactatcatgacatcaaaaggaaggccagtcattttatcacttgttcgagaattattttgggggctttccaatgcctgttctacggtgaattcgactttatgtatgatctcttttaataggtcttcaccatgaacagcatttttaagagtcaaaatttcttgctcagaatcaatcgttctgttctttctgaaaacaggagtcttgattacaatattttgtctttctgtatattgatttattaacaaagtcagtgccgctgttaatacgacatgcagacgttcatccgatccattgcagcatacattcagcttatcgcttaattgctgtgacaatttatatgtaagatttttcattcttttttctttagaagatttacttcccactaaaaaatgctcttcagtttttaactcaccaatactgtttttatctccctttatactttttgtcataacaaaaactccttcacttgatatcaaaattcaattcattcactgaattaaaacagcagaggctttcggtggatttttatgttaaactgcatcacaggcaataacgctcaccaataattgttgttgtagtctgacagtttatttatcggcagcaaaaaccattttttaatgatatagacccgtataaacactttttttaaaaaaaggataatgaagaagaactagccatctttaagaaatattatacaaatatttaagagttgtcaattagcagggaaaaacacctaagcacattaacccagtttttatttttcgtattaacataaaaaaaccgggacaaagtaacactcccgatttttcaatcaacaatttatctcaaggttttatttataatgtcagttatttcattcgaaaattgatgaataaaaaagtgatttccttcaaacgtataaaaattgcatttccctaaagtataatgtccccaattacatattaaatctgagcttatcgtcttgtcattaataccatgcaacactgttatatcacagtccataacagtcttattttcagaaataacatccttttctaacattttgaaatcacttcttaaaataggaagatataattgttgtaattccttgttatgtaacagttcttccgaagtcccgcccatatccatgattctttgcaaaaataaattatccggcaaagcatgaatcatcccctctgcttttttcgttttaggaatgccgcatccggaaaaaaatatgtgattgggcttcttctgctgcatttcagcaattttacaatataacttataaactaatcggcctcccatactgtggccgaataaagcataatcacactccctgatttgatcctttatcagatcatatatatcattaacagcctcatctatatgttcataaaaatcttcgttaattcttgtacctcttccttttaactcaataggatgtattgttaaagagtcactcattaaccttctccatttatagtatattgcacttgatccccctgcatacggaagacaaaatatttttttcataattcacctcagaaattttgtaataacccgataaaaaaacaccctgaaaaggatgtttttactatctcattttatatatgaaatgctcttgaaactccgttgatgatgaggaagattcctattactcttaaaatgatccttgttgttctgttatcttttccaaaagcaacttgcccgattttaccgataaatacattcatgagtacacctataattaattcagccattccaaatagttcttccatacccaatttcctcacgtcctttttgatctgttaattttatccgattattgttgatttaattttcttttttaatctccctgcttatcaagatgaaagatacaataatacttaataagccgacacttgcaaaaattacgatcggaagccattcagttcctaaggtactcttactaaagataatgttgtttaaagactgtattgcccatgcttcgggtgtaaatttagaaataacctgcatatattttggagcaatttccaatgagaaaaaggaaccgcctatcatcccgcttactgcaattatgatcgatgcggcagaagtaaactgcttttggcttctcataaatggaaccataatcatcgtaatgcaggtcaatgcaaataaataaacagcgagcataacagcgatggcaaagatgttatgacctatgctgatcttgagtaagtattttcccgcaagtattataacgattatatgaatgattccggaaatataagtagcagccattttggataaaacatattttgtatagtttataggcgtacttagtaatcggctgaaagtattattctctttttcatcaataagtgttcttaacccttgaataacaacaaaccaaataaacattacaagaaaaccaattaatctcacggtcgcattatcctgagtatgtttaccctggcttaatgttttgtcattcacttctattcctgaattgtttttcaatttcttgaaaatgttcttttctatatcttttgagtccgtatgcaactgcgcagacatatattgcgaatctttaactacctttttaagagttcccgcctcatttttgaccagctgctctaacaatgttccgctgccgttctcatagttttggatgattttcatttttatcttgtgattgtccgccaattcctttccaaaacctttttcaataacgaccccaaaaggaatatcctgatcatcgacttttttctttatttcattttccgttagctttataactttaatatttttatgctcttttatcatttcaatgagctttgcagcatagttgcttttatcagcattggctatatacaagttctctttgctatccgtatcttgggaaaaagagaacaaaaatgtaaggattaacggcactgaaatagttgcaaaaattgctaatctatttcggagcatcagcttcagctgatgtttaatcatggcaatcaattgcactactacgccaccttcttcctgttgaataccataatattaataaagacaaagatgagaccaataccaattagctcaagcaaatcaatatacatgccgctaaggccaatattctgtttgacttttaaataagagtttattgccttaccgttcggtatgatctcttggacaaccctcaagctatcaggcagtccgttcttaggaataaaactgcctcccaaaaaactaaaaatataaagaaccggagaagccatactggacaccgccacgtggtccttagcggtaaaaccccaaaacaatacaatgctgcctatagcaaatgcgtatactaccgtaataacaaaaatatcaaacaagttgccccagttcattcggaatacgacccagcttatcagaataacagcagtcatctgcattaagatcgcaaaaataatacctgtcaactttccaagcacatactgaatatttaaagtcggtgtagatttaattctgaacagcgtattattctgccgctcatcaacaatgctatgaacaagcacaaaagccgtcataatggaaaacataacaaccattgcaattgaataatactgcatggaatcgacaggaaccgcatttttatttgtcgctgcttttgggatatcagcggagatcccgtcattatcggccaaatcgttcatcattttttctattttttcttttggtacgctgccgccggggctgatatgttttattacttcttgttgctcagcactcattgttttcacgcttttcgtaaagccctccaaaacagcctgaacaatatttttatctatggtcttattattatctccaattaaatcgatatttgttttcccgttgttcataacggctttcgtaaagtgttccggtacatagataaaagctgcagcctttccttctttaactaatttttcaccgtcattgtagctctcagcttcttttaaatgaatgatatctttgagatctcctttcttaaaaactttatcctttaagacatcacctaaagaaacactctctcctgaatctgctgagtaaaaagctacatcaaatgcttcgatttttgaatctgaattactgaacacactgcccaatatgaggattagcagtgatggaaacagcatcagctttaaataaaatgacttattttttgttaacagcttaaaatcaagaaaaaataagttgaataattttctcaagatagcctcctcctactaatctcttaggtttttccctgtaatttgaaggaaaatgctttccaaatttacttcctcgtacttaaagctagtgaggtcgatccccagatttttgatatcatctacaatttcaatgatgtttctttccttcgtcgatacaagcattgaaatttgtttatgatctaccgtcactttatcaattcctgtaatgctgtttatccggctgagtgcctcttcatcagcacccttaaaagtaacagttaaagtgtcacaagcatttaagttttccttgagttcttctttcgttcctaaagcaataagagatccatgatcaacaattgccaccttctcgcaaagatactctacttcttccatatagtggctggtataaataacagtcattcctttttctttattcagcctttttactgtttcaagaatatgatttcttgattgcggatcaattcctacagtaggctcatcaagaattaataatttaggattattcattaacgccacgcctatgttgacccggcgtttcattcccccggaaaactctgatacattttgattttttttatctgtcagttcaataatctccagaacctcatcagttctttcttttagctttttccctttcagcccgtaaaggcttccgaagaagttcaagttatctttggcgcttaacgtttcatataaagctaaatcctgtggaacaacccccattattttttttatctcaataggtttttccttaagtgatttattatctactttaattgtcccgctggtaggtgcaagaacagtgctaatcatagaaaccattgttgatttgccggcaccgttaggacccaatagtccgaatacttctccatcttctacagtcagcgaaatattattaactgccgtaaagtcatcatattttttggtaagtttttttaattcaagcataattaaaacacccctcgtggtatttcggttcttttattttaacctgaatggaatatttttagaatttactatagtactcatttaccttattactttagttacgaatcgcatcgttactttagtcatatacggaaggtgtaagtccggatatattcagaagaaaatggaggaaaggaatttgatgaaattcctttctgattgaaggaaaaaagttgaatcacatatgcttttgtaaatataagctaagctccgttcggttgttcatttgaagtttttccagtattcttgatacataatttttgactgtgccttcagtaataaacagtgcttcgcttatagctttgttgcttttcccttccataatctgtttagcgacttctttttctctgggagtaagcaattgcaccagctgttccttttcattattttcttgaacaagctctttattatgttctaccgaatttagagcctttacaacttttagcgttaccttaggatttaacagaatattgccttcacatgctgttttgatggaatcaataatttcttgtgaatcagaatctttcagtatgtaaccatcagcaccgcttttcagtccagtaaaaatgtattcactatcgttaaaggttgtcaggataatcactttaatatccggatatctctctttaactagctttgttgcttcaatgccgtccattacgggcattcttatatccattaaaatgatttcaggccttatctgttttagcaaatctaataaatgttcaccattagaagcttcgcctacaatattaatttcctcgtgcagactcagaatcattttaagcccttccctgacaatttgctgatcatccacaatgataatatccatatcaatacctcctcacattccgattaaagatctgctatctcggggattacggcttccacagtaaatcctgaatctagccctgaataaaaatcaacctctcctccaagtgcggcaaatcttttttctattccgtttattccatttgacttattaatttcagaacatcctgttccgttatcagttatcgatatagagattttttcaaaagacttacgtatttttattgaaaaaaacgtagcatttccatgttttatcccgttggttatagactcttgtactgttttatagagacaattcttgatatctggatcagctgactctactttattgtccatatcaagctcgaattttatttcatttgtttgctgaaaattttcaaaaatctcattgatcgatttcagaagccctttttgaggagcagggtcattgagcaaagcgacagcttctctcaggttaataatacactccttcgataaatcatgtgacttattgatgacttgtttagcctcgccgggatttttacttactattttatcggcgaattcaagattcattgttaatgcgatcaaataatgccccagggaatcatgaagctcttgtgcaattcttgtccgctctttagaaatagttaactcttgaattttttgagaataattcttaagtttagtgtttacactttgtaattctttatttaatgtttgtatttttgctttttcgagcagtacgtttctaaacagataaataatagccatgatcactaaataggacatcaatatatctttcccgctggtccctgctgctttaagagctgtaaaaaaaataataaaatgcagacttactacagtccagggcagtttacgagttgttacaataatctcgatcagtaaaaaaatattatatatttgagaaccgagacagttaattttaaacaataaaatgcctgataaaaggttacttactaaaaaagatgcataatatctaaaagaatactgaccgcttaggtattttaatctgatatgatcgttgacgactaaaaaaatggtgataatcagcaggtaagcggattccgaagccgtaaaagttggcgttttaaaaatagaactgataatagaatataaggaaaaacaaataatggttttctctatgagcactcttgtactaattgaagaaagatttttcataataatccttcccgagacaacttgatataaattatattatacatatattgagaaatcataaagcgacaacctccacgttcagcacatcatacagctcatcaagcgaatgaatttcatacgtcgggataatcccggactcatttgctttctttccgggattaaaccagcacgtatccattcccgccatctgaccgccttttatgtccgcgctcaatgaatcgccgataataagcccgtgcccggcagaaaaaccgggaattctcgcaaatacataatcaaagtattccttcatcggcttttgaaaacccgtgtcctcagatacaaacacatctttaaaaaacggatacagaccggagtcgcccagccgcttatattgtgatcttgagacgccgttcgtcacgatgtataaatcaaataaaggactcagccgttcaatcagctcataagctccgtctatcatctggtgcccttcttctaagtattggcggtacgcctgattcatcagcacgccgtcggcttcaaggccgtattctttaaacaaaagggcaaaccgtgtattcaccacttcatcgcgggtcatttccccctcttcaaacgccttccacagcccttgatttaacgctttataacgggcttccacctctgccgtcagctccagctttgaaccttggaacaatttttgaagagcatcggtttctgaagcggtaaaatccagcagcgtattgtctatatcaaataataacgtacggtaatgactcatcgatgtttcccccggttctgctttttttaaccagtataccactcgcggacaagccgaaaaagacacccctgtaagagaggtgtctttttgaattatacagcgtcttctattttcgatttttcaccaggcatgcgcttgccgataccgaacgcataatagctgaccgtcacaatcgccaggaaaatcaccccgacaaccaaagaaatccgcgtatctttgttaaaccacatgccgatcaataccatgagtaagaaagcgatcgtcaaatagtttgtaaacggcgcaaaaggcattttaaacggatgcttatcaagctcagcgcctttcgctcttctgaaaccgagatggctgatcaaaatgacgaaccacggaatcattcccggcagcacactcgcgctgtacacataaacaaagattttcggaggcgcgatgtagttcagcacgacaccgatcacaagtccgattaataccgcaagcgtaccgaatatcggcacaccgctcgaagaaactttcttaaagaatttcggtgcctgtccgttcacgcctaacgtataaagcatacgtcccgcactgaatatcccgctgttgcatccggacatcgcagcggtaatcaccacaaagttaatcagaccggccgccgccgtaatcccgactttcgcaaatgtcgaaacaaacggactgccgagtgagtgaagctcattccacggatatacggtaacgattacgaaaatcgcaccgatgtagaaaattaaaatccgccagataatactctgaatcgcgcttcgcagcgttttttgcgggtccttcgcttcccctgccgtaattccgatcagctcgaccccttgataggccgcaacaaccaaagacaaagcaaagaaaaatcctgaaaaaccatttgtaaagaaaccgccgtgcgaccataaattagataatccgatcgcatgccctccgttaccgaaaccgaagaaaataattccgattccggccacaatcatcagaataatggtgacgattttgatcatggcaaaccaaaattcaaactcaccgaaagattttactgaaattaaattcgccgcaccgagaatggccatggcgataatgccgggaatccatgccggcagatcaggaaaccaatatttcatatacgaaccgacggcgataatttcagacatcccgacgatcacccattgaaaccagttgctccacgccgtcatatagccggctaacggatgtatatacttatggccgaatgtcgcaaacgaccctgtactcggctctacatagagcatttcgcccatcgcacgcatgataaaaaagataaagatacccgagatcgcataagccagcaggacagacggcccggtccatccgatcgtgctggatgaccccatgaataaaccgacaccgatcgtgccgcccagcgcaatcatctgtatatgacgagcgcctaagcctctctttaattctttgtttgccacttcgcttcctcctcttaacagctctgatatatgtgaaataatgaagcagaaggtgcacctgttgaacctaactcactcttcatttcccgcaatattggaaatattctatcttcctatcgttatataatctccaatttccttattccatcataataaattttcgtggaaaatacaattgtttttttcaggcaaacaccttacactctgaaccaacggactaaaaataaagcgctttcatttttattgaattgtgaatattgagataataaatgccgcagcctccgagaaacattatttcccaggagaaacgttttccgccccctatccaatattatttttgctaagcagaatggcgtaaagccttactctcttccattctcccttgtatacgccataatcctgcttaacccggcaaaaatcatgcattaatcgataaatgcctcattcagccgcagcaaaagccggccgaacatttctttttcatcgccggaccaatcgtcaagcatacgatgataccgctcaagacgcatctttttatcagcttttaacctctgtttgccaagcttcgtaatcgcaaacagactgacccgcccgtcagaaggatcggaaaaacgctggatcagctctttcgactccaaggccgctgcctggcgtgataatgtggaaatatccagcttaaatgattcggccaattccttcacacgcgccggcccgaattcatccagctgccgtaataacaaatacgcagccctttccagatgtccgattttacggtcggagttatcaagataaacagctctcctgatgaaagtggtgagttcatattcaattaattcaatcggatcttgttttgacaaacgcctcactccttacattgacaacagcaacattagttgtataatacaaacatatgcacatttactcagaaaacatatagaaagattttgcatacatatatttgtatagtacaaatatatgtgccaaaagtaaagaaacttatagaaacatcaagaaagggggaagctgctcttctccaaagaacagcatcgttgtgaaagtcatacgcatcatcttgcaaatcattattttattcgcattttcctttatcgggggagccgttcagcagttctttcacctgcccattcccggaagcatcatcggtttgatcctgctgatcatatgtttatcggttaagatcattcccgtcaaaatgattgaagacggagccggatttttgctgtcttttcttccgctgttattcattccggccatgacgggcgtcatcaattacccgtcactgttttccgccagcggggctgctctgtttctgatcatcgtgctgagcaccatcgtcacaatgatcgccgcagggtacgccagccagctgttagagcataaagccaatcagagaaaggagaaaaagaagtgcagcaagcatgtatcgcaatccttataattttgttcacggccgccgcctatctggctatggtgaaattatatgtgcgctttccatacccctttctcataccggttttgacgactacgattttcattatcgccgtgctgcttgtttttcatattccgtataaagactatatgatcggcggacaatggatcaattcactgctcggccccgctgtggtggctttggcatacccgctttataagcagcgccgggtgttaatcaagtatatgtttccgatcatcggcggcgtgttggccggtttattctccggaatggtcagcggcctgctatttgcagagctgttcggcatcagccggagtttgattttgtcaattatcccaaaatcaattacgacgcctgtcgccatacagattgcgtccggtatcggcggtgtcccttccatgacagtcgtgttcgtcatgatcgcagggttttccggcgttatcttaggaccgctgcttctcaagtggatccgcatccgcagctcactcgggaaaggaattgcattcgggagcgcctcccatgcgctcggcacctcaaaagcaatggagtacggagaattaacggtctccatgagttctgtttccatgacgctctgcgccgtgttagggtcggtcttcggccccgtcgtagcatggatgtttcaaatttaaagccggcggttctccgtcagcttttttcatgtgcggatcatctcatttccttccattattatgtttcatttgtaagaataatggtaaagtagaaaacaaggagggatttaatgatgactggggcaattccgcaaaagaaactgcttgatgggacaagcattcccgcgatcggcttcggtacatacgctcttaatggaaacaatggcgttcatgccattaccagcgccattgatatcggctaccgtctgattgacaccgcttataactatgaaaatgaagggacggtcggagaagccatccgcagaagctctgttccgagagaacagctatacgtgacgtccaagctgcccgggcgctaccatgactatgacaaagctgtacaaaccatccaagaatctttataccgcgccggtctggactactatgacctgtatctcgtccattggccgaatccgaaacaagaccgctacacggaagcatggcaggcactgattgatgcgaaaaaatggggcctgatccgatccatcggcgtctgcaatttcctgcctgagcacatcgaacggctcgaacgtgaaaccggtgtaaagccaggcatcaaccaaattgaactgcatcccgcttttaatcagcagcagcagcgccaatggcacgaagaacagggcatcgtgacagaatcatggagtccgttatcccgcgccggcgaagtattgaacgatcaaaaactcggacagattgcggacaaatacggcaaaaccatttctcaagtcattttgcgctggcatatccagctgggcgccatcccgattccaaaatcagcatcgcccgagcgccagcttgaaaacatctctgtttttgatttctcccttgatgaaaacgacatgagcatcatcgactcgcttacccgccccgacggacggataaacggccaagacccggcggagtatgaggagttttaaaaaaacacataaagaaaagctgacggcatcatttgtcagctttttcaccttttactctgggatagccaagactgtgaaactttgcagtaaaggctggaaacacacttatcctattataaattgatcagctgctaaaattcttttttatgatatatagctgcggcgatgaaaaatgaaatgatatataagataacgccgatcatgagatatataatcgggacatataaagaaggatttatgtgcaaaaatgacagcggtacttgttctgctgcatacccaacgacactttgcaatccaaaggtagcaaaaagtccccccattgcccctccaatcacgatagcatcggatttttccgggcctatcatgtagagaagaggataaacgattgcaccggcaaagagaacgatgaacgttccaaaagagacaatattaaatataccgtcaattggttcatcagaacccaggctgtatacaaggaaaataccataagatattacagctccgatcacaacaatcaaaagataaaagaaatagtgactttgaacaatatttgttctgctgaccggtaaagtcagaacatacctgtcatagcctgacttgctctcatactttataacctcaagtgcgggcataacgacaaacaaaataatcagcatagcaacaaaacgatgcattgaagcatccccaaaataaaaaatgactgctgataccaatatggccaaccccgtgtatgcaaagaaactccgataaaccaagtaatagttagtcagtaacagacctctcaatgttttcactcctcgttaaaaagacgctgatttcttctatggaaatggtgttggccgttacgccattcggcaatttctgttgatccgatacaagcacactccaataagatccatgattcctttttgctagaacgatatcttcgtcaatctcagccaattgaccttcatcaacgtctataacggtatagctttcaagaaccttatctttctcttcatttaataaaatttcgccatctttcatcataatgatatggctggctatcttctcgacatcagtcataatgtgcgatgaaagtaaaatacctccgttgcttttactcacaaagctttttaattcatttaacagatcatctcttgaagagggatcaagccctcccgttgcttcatccagaagtaataattttgcattatgcgacaaagcaacagctacagataacttcattgacatgccgcgcgagaatgtattcacttttttatccataggtaaagagaaagaatgaaccaaccggtaaaattgatcttggtcccaagcgtcgaacagtttcttaaatacatgattcagctgctttatcgtaaggtgcgcgggaagattcatcgcatcaaatacgaccccaatatcttctttaaactttatatgtttatccagattctctttaccaaagattttcactttacctctatcctgagagattaatcctaatatcgttttaaatgttgttgacttgcctgcgccgttatcaccgataaaaccgacaattgatccggcaggcacattgaatgtaacatcctttaaaacagctttatgaccaaaagatttgctgatgtttctgatttctaaaaggtttgacatcattccactcctatcattgttgtcaggacttttttaagaattgaaccggattattgtaaaaatgttgtgattttcatatctggtctaggtattcataatggatcaggagtcgggaaatacaaaagggattttaaagtcttaagcataatatggaagtgtaatcgattgattaggtttatataatgggatattcatgatgaaaactgctgaggtgtttactttccgatgaggtatacacaaaatgatttactaatgattacatttatggattttaaccggaatgcatctcgtattataaagcaggtgttactccttttcaatatataaaaggggatttctttacaatcgcaaagagtatgcatttctcatttccgcattaaaaaacccctctggctaataaccaaaggggttaaatatattattccacagtcacgctcttcgcaaggttgcgcggtttatcaacgtcacagccgcggtgcagtgccgcatagtaagcgatcagctgcaatggcacaacagaaaccagcggagcaagcgcagggttgacttccggcaggatgaatctgtcgtctgcgtcttctaagcctttcagcgagatgatgcaagtgttggcgccgcgggccgcgacttccttcacgtttccgcggatgctcaggttgacgtgttcttgtgtcgcaagcgcaaagaccggtgttccttcttcaatcagagcgattgttccatgcttcagctcgccgccggcgaagccttccgcctggatgtaagaaatctctttcagcttcagggcgccttcgacacacacgaagtagtcaaggccgcggccgatgaagaaagcgtttcttgaaacagtcaggtactcacgcgcgatcatttccatttcgtccttctggtcgcagagggcttccatggcgtttgccgcaatacctaattctttgaccaaatcaaaaccgatatcaacgccgttgcgttctgctgcaacggacgcaacgatcgcgaggacggcaatctgagccgtatacgcttttgttgatgcaaccgcgatctcaggacctgcgtgcagaagcaatgtgtaatccgcttcacgggaaagcgttgatcccggaacgtttgtaatcgtcagcgctttgtgacccagcgctttgacttgaacaagcacggcgcggctgtccgctgtttctccgctttgagaaaggaagataaagagcggcttcttagacagaagcggcatgttgtaagagaattcactcgctacatgcacttcaaccggtacgtttgcccacatttcaatatattgtttcccgacaagaccggcgtgatagctcgttccgcaagccacgatataaatgcggtccgcttccgccacggcgtcagcgacatcgcccgccacggccagtctgccgttttcgtcctgatacgtttggatgattttgcgcataacaagcggctgctcatccgtttcttttaacatgtagtgagggtatgtgcctttttcgatatcactggcgtcaagctcagcgatataagacgcacgtgtcatgacttcaccgtcaagatttttaatcacggcttcgtcttttgtcacgatcaccatttctttgtccaaaagctcaacgtattcattcgttacttgaagcatagccatcgcgtcagatgccacgacgttaaacgtatctccaaggccgattaacagagggcttttgttttttgcaacgtaaatggtgtctgtgttttcaccgtcaaataatgcaattgcgtaagagccttttaacagagtcagtgttttgcggaacgcttcttctgtgctgagtcctcccgccacaaattgctcgatcatttgaacgactacttcagtgtccgtgtcgcttttcagttcaacgttttcaagatactcgcgcttcagctgaacatagttctcgatcacaccgttatgaacaagtgtaaagcggccgagtgcgctttgatgcgggtgagcgttcaggaagcttggttcgccgtgagtcgcccagcgtgtatggccgattcccgcttgagattcaaccgtgtggtccaccacttcacgaaggtcggcgatgcggcctttttctttgtacacatgcacgccctgctcattcgccacagcgataccggcagagtcatagccgcggtactcaagcttctctaatccttttaacaaaatctctttcgcatcaagctgaccgatgtaacctacaattccacacatattttcttcctcctaaaggtgtaaaaggagacgaagaaagtcaaattacaaggggactttcaatcgtcccctcccacatgtttttttggaagatcatgtgatttccctttgttcggagagtcgcccctccggtttgaagaaatccttacggctgtgatctaaatgaatcagccgggaggcatccgccgaaaattcgataacctccatcctcgtcaactaagccgtttttcgggcgcttagttcgggcgctgtaattataaaagatgcaaacaatcccgcctttcctgcaagtgaaaaacaaaggctgaacaagcttgattttacagcatgtgccaaggacggtcaattattttttgccgccccggcatcatgtttactatcattttatgctgatcgcacttgtcttgttcgctctctgcttataaacttcgctactccgctcccatttctgtccgcacgacatccacgatttttgtgacatattcgtcacaaagctcttttgttctcgcttccgccatcacgcgtacgagcggttcggtgcctgacgggcgcactaaaatccggccgtctccgttcatttctttttccacttcagaaatcacggccttcaccttagcgttttcttctaccttatatttatccgtcactttcacgttcactaagagctgcgggaattttttcatttcatccgcaagttctgaaagggttttgccggacgccttcagcgtattcacaagcatgatcgcggacaaaagaccgtcgccggtagtgttgtaatcaaggaaaataaggtgccctgactgctcgccgccgacattatagccgtcttttttcatcgcttctacgacatagcgatcgccgactgccgtttgaacgcttttgatttcttctttttcaagcgctttgtagaaaccgaggttgctcatcacggtcgatacgacggtatcatccttcagacggccttctgatttcaaatacttcgcgcatatgtacatgatctgatcgccgtcgacgatgtttcctttttcatcaacggcaatgaggcggtcgccgtctccgtcaaacgcaaggccgatatcggcgtttttttctttgacgaaagcactcagcgcttccgggtgtgtagaaccgacgccatcattaatgtttaatccgttcggagacgtccccattgtagatacgtcagcatcgagatcggcaaaaaggtgcgtcgcaatggaagatgtcgcaccatgggcgcagtcaagcgctacatgaatgcctgtaaaatcttcgtccgccgtctgttttaaaaattgcagatacttttgaacgccttcaaaataatcgttcacaagcccgaggtccgcgcctgtcggtctcggcagcttatcttccggttcctccatgagacgttcaatctcggcctcctgctcatcagaaagcttaaagccgtcccctccgaaaaatttaattccgttatcctgtacggggttgtgagaagcggagatcatgacgcccgcctcagcatccatggctttcgttaaataggatacccccggcgtagaaataacgccgaggcgcatcacttcagctccgatcgataaaagtccggcgacaagggctccctccagcatatgtccggagatacgtgtatcacggccgatcagcactttcgggcgctgcttatctttggtcaggacataaccgccaaaacgccccactttaaaggccagctctggcgtaagctcgctgttggcaacacctcttacaccatctgttccaaaatacttgcccattttgtatcgctcctttttcattctgttgaagaagaatcagcgcttgatccgtcttcatcctggtcttgattttgatcctggttttgacttttattctgatcgctgtcagtgtcgtcttcccggttcttgttcttgtctttgtctgcgtctccgcttgtgccgttcttattgccggaatcagcggagccgccgtcatttttatttgaacttgtgtttttcttagaagtcagcttgatcttaaccgtgtcttttgacagggaccatgtgacgttttgcgggccgtttacttcaagctttacagagtgctctccgtcatccaagtccgagacattggcatacagttcaatgtccgactttttcagcgccttaatgttggcgggagagcctttggccgtaatatttatcgcctgcgattcagggtcgagaaactcaatctgctgtgagcctcccagtccgaccgtcttgattgcgacattgtcaaaatcctttttgtcttcactgtccactttaacatgaagcgtgattttttccggtgataccttagtgacacccttaggaagcgggatatcggcattgatatcggtatctttatcaattttgcctaaatcaagagatacgccgtcaataaattcaagtgaatccagcacatcctgcgggccgtaaaccgtcacctcactcggattcgagtcaatgctcgcaacgctcaccccgtccggaagacttcccttcctttcgattttgaaaggaagctttttgctcggactggctacgggaaccgtcactttaatgactgacggttcaacatcaacaggaagtgcgttgccgtctttgtcatagacggtcaccttcacttccttttcaatggtctcatttgcattttcaaggttcacagatgctttgacaagtgaaatgttatcaatcacatttttcgaacctgtaatctgcacgtttttcgggctgataatcggctgctgaggggtatatccctttttcattttgcttttattgtagtattcaacttccacgggaaaactctcagccgttttttcctgaatcgtaaccgtcgtgactgacgggtttatggagatcgtcagtccgtccgatacgtttttcgccttcaattcgaccttatgagtcccggtcttcagcttattcatatcggcgtatatctcaaaattcttcgtctgtctcgcctttttcaccgcgcttgtcgagcctttaatcgtgacatttaccgtctggggcacgccggtgacgacatagttcgcttcatcgtagtatgcttttacaggaatatcagtaagcgtagcctcgtcagtcgttgatgtcggaaaaaaggattcccccggctttttcggagtcggcgcctggttgttgttaaccgcaacgtaaagcagcagcgccaagagcaatgcaatgatctttacagcccagcggttgtttaagaatttatccatttttcttgcccctccagtaccagcggttagaagaagtgtctctggcgttcttcttaaactcggcttcaagcatttctttcagtgcttcttccgtcaattctctgtgaaggtctccgtttctggccacactgatggcgcccgtctcttcagatacaataatggttaagctgtccgtcacttcactgatgccgacagccgctctgtgacgcgtccccagctcctttgaaataaacgggctttcagaaagcggcagataacaggcagccgcagcaatctcgttatttttcataatgaccgctccatcatgcagcggtgtattcgggatgaagatattaatcaaaagctccgagctgacctgcgcattaagcgggatgcccgtctcaatataatcgcccattcccgtatcgcgctcaatggcgatgagtgcgccgatgcggcgtttcgccatgtagctgatcgattttgtaatcgcttcaattgtcttatgctgcgcttcctccacaggggttccgctcctggaaaagaaccggccccgtccgagctgttcaagcgcccgtctcagctcaggctggaatataatgatgatcgctaaaaatccccatgttatcgcttggtccatcagccactgaagcgtgctgagtcccaaatatgaactggccatccggaccaatacgatgacgacgattccttttaaaagctgaaccgccttcgtcccgcgtatgaccatgattaatttatatatcacataccaaacaaggagaatatcaacggcattgccgaggtattgcaaaaatgggatgtcctcaaaagccatttcctcgtcctccaagaattcagtcatttcgttttttccgttatgaattgtgctgcatgagcaatatgtacatcatatagcgtgctcattataccacattttgatttctcaagtgaaatgagccggcgcggcgttgcacaaaaaaagagtaaagcgattatacgctttactcatcttcattcgggtccaaagcgcttacgacgccctgtcccgccgatttcagttcgtaccagacccagtcaaacaattggttaatctcttcaatctgcccggtgacttgtccggctgaggccatgtatttttctccgttgacgacggtcacattgccgtcgacttttccttcaatgaacagcttgccgttttttactgtgacatcgccctttacggtctcgccttcagggacggtgaccgtgtgattctgcacgacaaggttcggctgtttggacacactgaaattgtggtcattatgccagctgttgaaaaaaccgccgcccattaaaatcacaaaaaccgctgcggctgcaatcatcggatgagttttgatccatcgttttacagaagcgcgttttttctcttttggaagattcgccataactttggcagtaaaatcagcaggggccgtgacatgcgatgtgcttcggacgagtgctacggatttctccatttcatgaaaatgccgtttgcaattcccgcatgactgcaaatgttgttttaatacgttttcatcttcaggaaggatatctccatcaagatgcttatgcataagctgcacaatctgttcaggacagctcatttcatcaccccacttaaagatccctcaattgttttctaagagcctctctgcctctgtgtatccttgtcttgacggtgccgacagggatattcagaatctccccgatttcaattaaagagagttcgtcaatatactttaatacaataaccgttctgtacttgtcaggcagctttaaaatctttttctgaattgtgtccgacagctccaatgacaatacggcgtcttcagggagaaccccgtccgcggcgatctgcgaatacatcgtcagcccttctgctcccgctacttctgcgtccagatagtaatcaggctttttcttgcggatgcggtcaatggtcaggttggtcgcaattctgtaaagccacgttgaaaactttctgttgatatcgaaactgtcgatattgacatacgctctgataaaagcttcctgcgcaatatcttccgcttcgtgaacattgccgagcatgcggtagcaaagctggtaaatcttatctttataaaggtcaacgatttctgcaaacgcattttgatcgccttttttgacttgcttgattctttttttaatcaggttttccatgttttatcttacctctgcccttcaccggtctgtatctatacgttgattgttttaaaaggtttcatttttttattacatttattttaccaaatttcaggcagggtgtagatggaaaatacagaatatactgccttaacagcagcttaaaaatagtatatctgatgaacaatcaaaaaccgaaacaaaatgccgataaaaaaagacacctttatgcaaaaggtgtctgagactgggctagctggattcgaaccaacgcatgacggagtcaaagtccgttgccttaccgcttggctatagcccaaaaatggtggaggggggcagattcgaactgccgaaccctgagggagcggatttacagtccgccgcgtttagccacttcgctacccctccgtatttttttggaaaacagtgccggccagaggacttgaacccccaacctactgattacaagtcagttgctctaccaattgagctaggccggcaaatatggtggaggatgacgggctcgaaccgccgaccctctgcttgtaaggcagatgctctcccagctgagctaatcctccatatgacccgtacgggattcgaacccgtgttaccgccgtgaaagggcggtgtcttaaccgcttgaccaacgggccgctgtgtccgcgtcgagctgacaaaagttattatatacaggttgtaccccatttgtaaagagaaaaattattttttttattttcaaacttttttacccgttttttaactgaaaaactcatccctcctctcttatttcatttatgatgaaagtatcaaaatattgaagggaatggacacagatgatcttagtcagctcttgtctcggcggtatcgaatgcagatataacggctctcacgccgcttcggaaaaaatccgcagactcgtagaagaaaagaaagctgttatggtctgccccgaacttttgggcggcttcaccactccccgcgaaccggcggaaatcatcggcggcacgggtgaagacgtgctgaacggaacggcaagaatcgtaacggcatcaggcgaagacgttacagctttatatatggacggcgcggaaaaaacgttagcatacgcaaaagaaataggcgccgcaacggtcatccttaaagaaaacagtccgtcctgcggcagcagctttatctatgacggcactttctcaggaaaaaaaatactcggagacggcatcacttccgctcttttaaaacgggcaggctgccgtgttctatcagaagatgaattggatcaattataaaaaaggagagtagatatcatggatgtagccctgtccttttataaaccggagcatgcagacgggctgaacgggtttgtgctgagtgaagaagataaaaagttcacagctctgccgatagatgtcctgccgcaggcgcttgtcatccgggatcgctacccgacagtcattttaaaagaagaccgccccgtcggtttttttattttacatacctcaaaagaaaccattgctccgtattcgaacaatgtgtctgccattttgctgagtgcgctgtcattacatgcgccgcatcagggaaaaggttatgccaaacaagcgatgctgcagctccccgcttttgtcgcaaattactttccttggtgtgatgaaatcgtgcttgctgtaaaccatcgcaatcaacgtgcaaagaacctgtaccggtcttccggttttattgacaaagggcggcgcaggatcggcccgatcggtgaacagcacattctgcatcattttttgtgaaagcgcttgattattcatctcatccctgccgatttttcttgaaacatctattcagaagcccatatacttcaagtattaacgacttgggagggtacaatcatgacagaccggcttaacattcacagattgaccacagaaaccagaaatccgcagaccgcttcaatccatcaggcagacacaatggaaattctccgcatcattaacgaagaggatttcaaagtggctgaagccgttcagcaggtgctgcccgatattcagattgccgttcaattcgcccatcagtccttacggcgaaacggcaggctgatttatgcgggagcgggcacaagcggcagactcggtgtactggatgcggttgaatgcccgcctacatacagcgtaagtcccgacaccgtcatcggtctgatggccggaggggcagacgcctttttgcaagcggctgaaggtatagaagacagcgaggaaaccggcgctctcgatctcaaaacgatcgggcttaccgcagaagacaccgtgatcgccatcgcggcaagcgggcgcacgccgtatgcggccggtgcgctgaaatatgcaaaaacaatcggcgccaaaaccgtcgcgctcacatgcaataaggactccttgatcagcacctttgccgatcacagcatcgaagtcattgtcggccccgaagtgattacagggtcaacacgaatgaaagccgcgacggcacataaaatgattctgaacatgatttccacggccgtgatgattaaaagcggcaaagtgtacgaaaatttaatggtggacgttcatgtcagcaacgaaaaattgaaagaacgcgcaatcggcattatccaaagcatcacgggcgttccgtacgacaaggcaaaagaaacgcttgaggccgcagacagccatgtcaaaacggcaatcgtcatgctgaagacgaattcggacgaaacacacgcgaaggcactgctcaaagaatcagaaggattcattgataaagccattgaacagcacgtttcaagagaaaaagaacgctgatcgttctttggagaaaaatattgtgcttttacgagcccgcgccgttttcatgttcggcgcaggcgcttttaggacgcgtttcaggcatagctccccgggaaaaatcgtacagaaaaaggaggatctccatgagcaaagaggcattttatcagtcactggccaaagatatcctggacaattgcggcggttcatcgaatatttcaggctttacccactgtatgacacgcctgaggattacacctttagatcgggacaaaacggatattgaggcgctgaaacggcttgacggggtaataggcgtcgtcgaagccgaaacactgcagatcattctcggcacgggtgtcgtcaatcatgtcgccgacgctttcgcaaaacttatgccatccggaaaaaacattgatttaaaagaagccgcctcacggaaaaaagccgatctcaacagaaaaaacaccacacccatcaaattgtttctgagaaaaatatcaagcatcttcattccccttattcctgcactcattgcatcaggtttaatcaccggtattacgaaagccgtcattcaggccggctggctcccgaaagaatcccaaatcgcacttattttaacggttatcggttcaggcttgttcgcttacctcggcgtccttgtcggcatcaatgcggcgaaggaattcggcgggacacccgcgatgggcggccttgcgggcatattgatccttaaccctgagatcgccaatatcagtttgttcggagagaatctgctccctggcaggggaggattaatcggcgttcttttcgctgcggtttttatcgcttataccgaacggtttatcagaaagtacgtccatcaatccatcgacattatcgtcacgcctacattgtctttacttatcaccgggctggtgacatatgtcgtttttatccctgcaggcggttttatttctgatctgattacatcaggtttattgtcgctgctgaatgtcgggggagtgctctcagggtttgtactgggagccgccttcctgcctcttgtcgtcaccggcctgcatcagggcttgactcccgtacatttggaattaatccgatcaatcggagatgacccgcttcttccgattctcgcgatgggaggcgcgggtcaagtaggcgcggccttcgccatctttatgaaaacaaaaaaagcctcattaaaaagagcgatcggcggcggacttccatccggtctgctcggaatcggagagccgcttatcttcggcgtcacgctcccgctcggccggccgtttttgacggcgtgtttaggggcgggaatcggcggcgcctttcaagcccattttcaagtggcgactttttcaatcggtgtctccggccttccgctctcgtttctcgtacagccggctcaaatcgttttgtatatcatcggtctcttcatctcttacgcggcaggctttgtcttcacttatgcgttcggatttaaggatgacatggctgctgaatttgaataaaccgggagggatcagaatatgaaaacactgacagccgccatactcacaatggtcatcagcctctcttttctgccgcagcacaaagccgaagcccaatccaaattatacgacgcagcaaagctcagaaaggttgatcaaatgattgaaaaagacatcgcagcaggattccccggagccgtcctcatcgtcgtaaaggacggacgggtgatcaaaaagaaagcatacggctacagcaaaaaatatgacgggaacacccttttatcccgtccgaaaaaaatgaaaacatcaaccatgtttgatttagcttccaatacaaaaatgtacgcggccaattttgcactacagcgactcgtcagccagggaaagcttgatgtgtatcaaaaagtctcggcttaccttcctgatttcaaagacagaaaaagcgatccgattcaagaaaaagaccgtatacgcgtcatcgatgtgctccagcatcaatccggtctgccggcaagcttttatttctatcagccggacaccgcaggccctttatattcacaagaacgggataaaacaatccgttttctcacccagatcccgcttgaatacaagccgggaacaaaacacgtatacagcgatatcggttacatgattctcggatgcatcattgaaaacataaccggaaaaacccttgatacctatgcggaacaagaactgtacaaaccgctgaaactgacgcacacactgttcaatccgctgcaaaaaggttttaaagaaaaagcattcgcagctactgaacgtttaggcaacacacgtgacggagtcatccatttccctcacatcaggacatatacgctgcagggggaagttcacgatgaaaaagcattttactcaatgggaggggtgtccggtcacgccgggctgttttccagagctgatgatatggccgtccttcttcaagtcatgctgaacagaggcagttataaacacgtttctctcttcaataaaagaacggccgatttgttcacaacggcggcatcctctgatccgactttcgctctcggctggcggaaaaacggcagcccggatatggagtggatgttcggaccttatgcaagcaggcaggcatacggccatacgggatggaccggcaccatcacgattattgatcccgcttataagctggggatcgcacttttgaccaataaaaagcattcccccgtcgtcagccccggtgaaaacccgaatgtttttgaaggggatcttttcccgaccggaagctacggcagcgtcataaaagcgatttatgaagccattgaatgacaacccatgtcttttgtccaaactatgacggcaggagggcaccatcatgaaacttttcatctcagctgtattactgttgttcattgtattcggcacgcatcatgcatcaacaaaaccggacattccgtcacaggcggaacaagcggtatcccgtatgacgttagatgaaaaattagggcagatgctcatgcctgattttcgaaattggcaaaaaaaggggcagtcatcacctgaggctcttacccaaatgaatgacgaagtcgcagggcttattcaaaagtaccggttcggcggcgttatcttatttgcagaaaatgtaaaaaacactgagcaaacggtacgcctgacagatgcctttcaaaaggcgagccctgacattccgctattattaagcattgatcaggagggcggcatcgtaactagacttggtgagggcactcatttcccaggcaatatggcgctcggggctgctagaaaaacagcctacgcgtcccagaccggcgccattatcgggaaagaactgaaagcactgggcattaatacgaatttcgcgcccgttctcgatatcaataataatcccggaaaccctgtcatcggcgtcaggtcgttcagttcagaccgtgatctgacagcttccctcggccttgcctcaatgaaggctcagcaaaagcagaatgtcgctgccgccgtcaaacatttcccgggacacggcgacacggatgtcgacagccactacggtcttccgcttgtcacccacaatcaagaaaggctgcgtcagattgaactttatccgtttcggcaggccattcaggccggagctgatatgatcatgacagctcatgtgcaatttcccgcttttgacgatacaacctataaaagcaagctggacggttcagacatcctcgtacccgccacactctcgaaaaaagtgatgactcatcttctccgtgaggaaatgggatttaacggcgtcatcgttacggatgcattaaatatgaaagccattgccgatcatttcggtcaggaagaggcggtcgtcatggcagtaaaagcaggagtcgatattgccctgatgccggcccaagtgacatcgctgcaaacggaaaaccgctttgcccgggttcattccgcgttaaaaaaggcggtacaaaaaggggatattccgctgcagcaaattaacaaatcagcggaacgcatcatttccctgaaaataaaacgagggatatatcccgcaccgaaagagacaaatctgaaaaagaagattgcaaaagcaaagaaaaccgtcggcagcaaaaatcacctgaaagctgaaaaacaaatcgcggaaagatccgtcaccgtcttacaaaacaaaaaccgcacgctcccattcaaaccgaaaaagaacagccgcgttctcattgccgctccttatgaagatcaaacagcggcaatggaacaaaccattcggcagctcatcaagaagaaaaaaatccggccggtaaccatcagtaaaatgaacttcgccgagcgcacatttcatgatgaacacaaaaagctggtatccgacgcggattacgtgattacaggctcctatgtcgtaaaaaatgaccctgtcgtaaacgacggcgtgattgacgattccgtcacagatcccggcaagtggacgaccgcatttccgcgggccgtcatgaaagccgcacaatcgaaccaaaaaccctttgtgctgatgagcctgcgtaatccttacgacgccgcgaattttgaagaagctgaagcccttatcgcagtctacggctttaaaggatatacagacggacaattcctccagccaaacattccggcaggcattgaagcgatattcggacagacaacaccgcaaggcaggctgcccgctgacattccttcagtcacgcatccgggaacgacactgtatccttatggtttcggtatcaatctgaagaccggaaaaccgctttaaacaggagggctgattatgaaaacacatacggctgcacttctcgccggacttgtcgtcatcagtgctatgacggcagtctcggcggcttctgacagaaaccttcataccgccaagaaaccaagcatccaaacaggcatcgaccgcctgctgaaagattataaacaggaactgaagggaaaaagggtcgggctgatcaccaacccgaccggtgtgaacgcatcattgaaaagcagcgttgacgtgctgtatgaggcgccagacatccgcctgacggcattattcggaccggagcacggtgtccgcggcgatgctcaggccggagacaaagtcacatcctatatagacgaaaaaacagggcttcccgtctacagcctatacggggagacgaggaaaccgacgcctgacatgctgaaagatacagatgtgctgattttcgatattcaggatgtcggaacccggtactacacctacatttatacaatggcctatgccatggaagcggccaaagaaaaaggcattcctttttatgtcttggaccggccgaatccgcaaggcggacgaaatccggacggcccggttcttgaaccggattacgcttcatttgtcggactgtatccgatcccgctgaagcacggcatgacgatcggtgagcttgctcttttattcaataaagagtttcatattggcgctgacctcaccgtcgtaaaaatgaagcgctggaagcggacgatgacgattgaagataccggtctgccgttcgtcctcccttcgcctaatatcccgaccccggacagcatatttgcatattcggcaacaggactaatcgaaggcacaaacgtatccgaaggaaggggcacgacaaagccgtttgaacttatcggcgcgccttatatgaaaagcaccgagctcgaagaacgcctgaacagtctcaagctttcgggcgtcaccttcagagccgcttcattcatccccagcttctccaaacaccagggcaagctgtgccacggcgtacaagtctacgtaacaaacagaaacacatttgaagcggcaaaaacagggctctccattctgaaaaccatgcatgacttatatccgaatgacttttcattcttgccgacaggctcttttgacaagctgatcggtaacggctgggtacgcaaaaaaatagaaaaaggcgcttccattgaagacatcaccggcacatatcaacgccggctggaccaattcaaaactctaagaaaacaatacctcatatactgacaacattcgtgttacacgtgtaacattttgacgcatttcacatttccgctttttataggaaaacattcatttatttggtacaatttaaatgataactgttatcatttaaatgaatgtttcctaaaaggtggtttctcatgaaaaacacattattctttcagcccattgatatcatctccgtgaaaaaaacagccgaccttctgtcagagcatcagctcactgattcccccgtattgatctttcatgtgaaaggcgagggacaaattgatatcggaacagacagctttccgctgcagaaggaaacgctctacatctgtccttgtgatgagacattcaatattgcccctatatcgtcaggcggcatccatttgtatatcgtcagactccgtgttttctcctattcctcagatgatgaagcgatgcttccggataacggggaagacatcttccacggacttcagcaaatgaatttacaaacggttgatcatttgacaagccggcttcaatcactttctgaaaacgtgcgatcggcggatggattgcagaaaatgaaatataccgccgactttcagcagctgatgtacgacctttatgccgcaaaagtatgccatcaaaataatacgaaagcggcgatcgaacagacaaaacaattcatacatgctcagtccgacacaaaaatcacgctcacccagctcgctcatatggcgggaatcagtcccaagcattacagtgaaacctttaaaaaactatacgggcagagcgtaactgaatatatcacagacatccgcataaccaatgcgaaaaaactgatggccaaggcaagctgcaaactgcgggaaatcgctcatcaaatcggctaccaggacgaattttatttcagccgcatctttaaaaaacataccggcagctcacctacaagctacatgaaaaaaaggcgcacaaaaatggccgcgtacggaaaagaaacgatggggcatctgattcctctgcatcacgtgccttacgctgcggcgctgcacccgaaatggacggcctattattacaaacaattctcttccgatattccggtccacctgagcgcttaccgctataatgcaaattgggaagagaacctgcatacgctgtctcaagctgccccggacattattttcagtctcgattctgtcagtgaagaagaaaaacagcgcctgaatgacatcactgaagttttttatcttccggctcaagagaattggagagaccagtttcttcgcacagccgcatatctgaatgaagagcaggaagcgcggcactggcttaaaacttatcaaagtctcacccattcagcgaaagatgctcttaaacatgtgcggcaccagcggttcttatttgtccgtgtatataaagaaaatatgtacatcgcccataacaacagtattgaggaagtcttcttcggtgatttggactttgcctccgcaaaaccggaatcatttgctcctgacgaaaagatttccttggaaatgctggcggattgccaggctgactgcatcatgcttttcacttgtaaagaaccggaaacgcttcgctattttcagcggattcagcagtccgggatatggcagaaccttagtgccgtcagcaataaacgcgtgtttcccatttcatctgacccgtggattgaatattctccaagcggacatcagcggatgatcgagcaaagcatttccattttatccgaagatcgtccatggtaatgccggaaattatccatggtcttatccctattcattctctataattccaattgataatagttatcaattgaacaggaggaacaatagatgaagaaattggcattcgctttcatgattttgcttttggctttcacggccgcggcttgcggaagctcagaaacaactgatacagcaagtaaaggaaaggacgcttcttcagataaaaagaaaatcgaatatctcggaaaaacatatgaagtcaaagcgccgactgacaaaatcgccattacaggcagcgtagaatcaatggaagacgccaaattgcttgacgttcatccggcaggagcaatttctttctccggcaaattcccggaactgtttaaagatattacagataaatccgtatcaacgggggaaaaaatgcagccgaatatggaaaaaattcttgagctgcagccggacgtcattctggcatcaaccaaattcccggaaaaaacgttgaaaaaattgagcggcaccgctgaaacgatccctgtctctcatatctcatcaaactggaaagaaaacatgatgctgctcgcccagcttacagataaagagaaaaaagcgaaaaaaatcatcgcagattacgaacaggacctgaaaaagacaaaaacaaagatcaacagcaaagcgaaacagtcaaacgcgctggtcatcagaatcagacaaggcaatatttatatttatcctgaacaagtttatttcaactccacgctttacggtgatttaggcctgaaggcgccggacgaagtcaaagcggcgaaagcgcaggaactgatttctcttgaaaaattaagcgaaatgaaccctgaccatatcttcgtacaattttctgatgacgaaaacgcagataagcctgacgctttgaaagacttagagaaaaatccgatctggaagagcctgaaggcagtcaaaaaagaccatgtatacgtcaatacgattgatccattagcccaaggcggaaccgcgtggagtaaaatcagcttcttacaggttgcggctgacaaattgactcaagactaataaagagtaggtttttcacatgtatgcaaaacggcggacacacattattatcattgcttcaccgattgctattgttctgtcactgctcctttccgttttatacggcgcaaagcagcttgacatccataccgtgttctccgcattgctgcactttaatccggagaataccgaccatcagatcatatggcattcaagaatcccgagggctgccggtgctatgtttatcggcgccgcccttgctgtttccggagcgctcatgcagggaatcacacggaactatctggcctcgccttcgatcatgggtgtgtcggacggctccgcttttatcatcaccctttgcatggtattgctccctcaatcgacatccattgaaatgatcatctactcgtttatcggttccgcattcggcgccgctcttgttttcgggctggcctccattcttcccggcggttttaccccggtgcagcttgccattatcggaacggtgaccagtatgcttctcagcagtctgtcggctgcgctttcgatttattttcaaatttcgcaggatctcagtttttggtacagtgcgagactgcatcaaatgaaccctgattttttgaaactggccgtcccgttttttgcgatcggaatcattacggccatgattctcagcaaaaaggtcactgccgtatcattaggagacgacatttcaaaaagtctgggacagcagaaaagaaccatcaaactcatggcgatggcggctgttgtcatattgaccggaagctcggtggcgctcgccggaaaaattgcctttgtcggtttagtcgttccgcacatcacacgttttctcgtcggatcggactacagcaggctgatcccatgcgcgtgcattatcggcggcgtctttctgaccctttgcgaccttgcgagccgattcatcaattatccgtttgaaacgcctattgaagttgtcacttctatcatcggtgttcctttctttctttatttgattaaaagaaaaggaggggatcagcgtggtgcgtaaaatggcaggaatttatatcattctgattgctctcatattgctcgtaagctatttcagcatgacaagcggttctttttccgcaaagccgggtgaactgctcagtacgcttttccgcatccatccgaatccgcaatatgacattttgctgtttcagctgaggctgccgcgcatagtcatggctgctgccatcggactcggattggggatagccggagctgttattcaggccattaccaaaaacggtcttgccgatcccggtattttgggcattaatgcaggagccggagcgggaatcgtcacgtttatgcttctgtttcagggacaatctgaagcgacggcacttgcctctgcgatgggtatgcctgtcttcggcctcatcggaggactgatggcggccgtgctgatctatattttcgcctggcaccgggggcatctggaatcgggcagaattattctcgtcgggatcgccatgaattccggattcagcgcgctgtctttatttctatcattaaaaatggacccgcaggattatgagatggcgatggtttggaaaaacggcagcatctggtcggcaaactggatgaccattacggcaatccttccgtggctgatcttgttcattcctcttcttatggcgaaaacgtcattgcttgataccattcgtttcgatgaggacacggtgaaaagcctcggtgtttcaaccaataaagaaaaaaccattttgctcattgcctgcatcgctttgatcagcgcatgtgtaaccgcagcgggcagcatggcatttgtcggactgatcgcgccccatatttcccgcaggctcgccgggattgagcacagatactcattaccggtcagcggactggtcggtatgctcctcgtcatatccgccgactttgcgggcaaattgttctttcagccttcagaagtgccggcgggaattatccttgcaattctcggcgttccttatttcttttttcttctgtttaagcaaaaaaaggggatggacgcatgagaggcacccttacagaacacccgataaacggaagggaatgcactgtgtatcttcctccttcctattcggttcaaacaggggctttaccctgtgtgtacgtacttgacgggggttctttgtttttagaacagatagataagcttgaatcccaatttacgaacggaacacttcccgaattgattttcatcggcatcaaaccggctgacagactcgatgagtacacaccgtggcccgcgccttccctgagccctgcgtttcatgatttcggcggcaaagggaggctctttctcgaggagctgacaaatgtcattattcccactgttgaagatacgcatcacatttctgcgcatccggaaacgagaggactgatcggtgcgtcattaggcggactgttttcgatatacgcgatgctgcaaaagcctgaaatattcggcagaatcggctgtatttccggttccttctggtatgaaaaatcagcagattatgtccgctccgcacctttgcggccggcacggcagcgtatctttatgtctgtcggcagccgtgaagcagagcaaaaatgtaacatccaaaacaccatgatcggacaaaataaagacgtgtacaaaagcctgaggcaaaaaggcttttctcaatctcagctctcattcacgatcgaagagggcgccgtgcaccatcaagaagcgttcaaacgacaatttaattcagcactaagctggctgtacggaaaaaaccgctcacgtgactgagcggtttttttcatacttgatcacgaccggcttaagctcaaagcgtctcagcaaatagccgaacaaagcggcaaggatttgctgaaagagcatcccgatgacgaccggaaccgccacttgagacggaaagaaagacacggcgagaacggctccggcgctgatattgcgcatgccccccgtataaatcagagacacgatttcatcctggctccgcttcatcagtcttccgatcagccaagccacggcataacccgtcatggcaataaaaaataccgtgcctgcgatgcccgcaaatttgatatccacgtgcgtgacatacggcgcgatttccgaactgttaatggcaatgacaatcatcagacagatttttgaaaaaggagacagtgaccggcttatcgcctgagtccttaccggcggggaaaactggttgaccatcatccctgcgatggacggaatcaccaccatctccgccagccctttcatcatgccccacacatccatctgaacattcgccccggccaggacagacaggcttaatggtacgataaaaggagaaagtacggtatcaaccaggataatagacagcgtcaatccgacatttcccttatacatcgcagcccaaatcaaactcgtaattccggtcggaatcaccacacccataatcagccccgtcacagttaaagggtcaccgctgaaaatcagatggccgcttccccatgcaaaaacaggcatgaaaatatgcagaacaaacaatgccatgatcatcgggagcggcttctcgatactgcgcttcagcgattgaaaattggcactcagactgcccgtaaatgtaataaatgcaaatatccacggcacagcgccggccatccagctgatatgctgagataacagcacacccgccgccacactagacggagtcaaaagcggcatgattctccccaacacttggttcaacttctgaagccacatcatatgcaagtctcctatatacggttttcaagtctcattcattataacaatgcacaccggcaaatttaaccgaaaaaaagcccggatatattcatccggacttcacaaattctatgccatttgtttcattaaatctcggcttttctgatttaatccctttaattcagcctcaattccgtattctttacatttggcgacaatcttctcaagagcagccgctccagaatcatcccacacgtgggcatcagtcaaatcgatgataatccgtttcacgtcttcatcataaacgatggcattcatcagttcagacacggaagcaaaaaagatctgtcccgttaccttataagttctgacatctttctgttcggaatgtgacacaatcttcagcttagaaattttcgccgtaaaaaagatcgcgcttagcagcacacccgcgaaaacacccttcgataaatcatttgtcagaacgaccgtcacgacggtaatcaccataacgatcgaatcagtaaggggcgctttccgcaaacctttaatcgatgaccagtcgaacgtgccgatggacaccataaccatcacggccacaagcgcagccatcggaattttcacgacgataccgcttaatacggcaattaaaaacattaaaaacgctccggccgtaaaagccgacaaccggccgcgaccgccggctttcgtattaatgacagactggccgatcatggcgcatccggccatgcctccgaaaaacccgttcacaatattggcgatgccttgtccgcggctttctttgttcttatcactatccgtatccgtcatttcgtcaatgatctgggccgtcagcaatgactcaagcaatccgacgaatgcaagcgccagtgaatacgggaaaataatccgcaatgtctcaaacgtccacggaacatccggtatcaagaaatgcggaagtgaacttgtaatcccgcccatatcaccgaccgtgcggacatccgcatggaagaccaccgcaatgatcgtcatgacaataatcgccaccagcggagacggcacagccgtcgtaaccttcggcaaaagatatatgatagccagtgatccgacaagcatggcgtacatgacccatgaagctcctttgaactgcggcagctgcgcagaaaaaatcaagatcgccaaagcattcacaaatccgatcatgaccgaacgcggaataaatttcatcaatttcgctatcttactgacaccaagaataaattgaataatacctgtcaaaatggttgccgcaaacaaatactgcagcccgtaatcagccaccaatgtcaccatgacaaccgccattgaacccgtagcggctgaaatcattcccggtctgccgccgaagatagaaataataatcgcgatacaaaatgatgcataaagcccgaccatcggatcaacacctgcaataattgaaaatccgatcgcctcagggatcagagcgagagcaaccagaataccggccagaatgtctttacggacattcccgaaccattgctgctgtaacgtataatctttcaaatgataacgactccttttcactataaaaatccgcaccttatcagttggaaacattgatttttatctggggaatatgaggcaagcttacggggaaaaggggacacgctcagagtataatgtcttgaggaaaggaatggttaacaaagagtatcatattaaactttaaagaaatgtgcaagaccgtataaaaaagaaaagaaaacggctctcactggagccgtttccgcttttataaaagttccggatcagacacaagaatcgtttttattgcgctgatatcctttctttcttttgtcaccgggtcgatgcccatgagatgatcaatggcttcttcataattcttcagttccgtcttttccgtaataaaatcatagagctgcggaaggtcggatgcacatgctaacgcagcctccatgatctgacgggcttcacctgtgcccacaatcgttacgccgtttgacagcagctgatacggcctgactgtcatctcatacgtatcatcaaagcccatcggcacgattctgcctcccttttcaataaaaggataagcccaatcaagctgattgccgatcgcgtcaaaaattacatcaaattttcttccttgattaatccgtttcacttcatccacggttaatgcttcagggtggtagacataatccgatatccggctcgccgcctcgcttcggaaactgcctatttcagtcgcaaccgtcaatcgcgccagttttttcaccatcatttgcacaagcagtccgattggccccgaccccaaaaccaagaccgagtcctccggctgaatcgaagctttgtccacaacattcagcacacaggagagaggctcaaccaatgtggcccgctcccattccattgaatcgggaattctgtacatgaacctgtcttctccgacgtaatattccgcaaacgttccgtgcgccccgattccgagctgccaatcctcgaaggtttcgcaataacacgtcagccctctccggcaataatgacatttcccgcaaaactgcgtaggatctatcacgacgcggtctccgacttttacatttgtcacgtccggtccgatttccacgaccgctcccaccgattcatgccccataatcatatgatgggttgcattcatttttcctttcagcacatttaaatccgttccgcagataccggtgccgaaaattttcactttcacatcattggatttccgaatttgaggctcgtccacctcttgatattcaagcttatcattaggagtccagaccaacgccttcatatttctcttcctttctgccccagcggatttggtctaacaatgtttgatgaagctccttcgttgatgccgcaatacatgattgctggttctgataacttaaatctgtcagaagcgtttcgtccaaagaccggccgtatgcatccgtaatgaccactcctgctttcttcgccaaaaagacgcttgcggcaatatcataaggaaacaaatgcagcacctctccgtttccgacctgctgaaaatctgaaagcagcttcggatcatctttcagcagacgattgccgatatccacataagcatccatctgccccgtgataattcgtgaaatcgaataagaagcgctgttgaaaacaaaaaccccgccattattggctgaccggtcaatcagatgaccgtatgcatccgtcatcagctgtgccggatgcccgttaaactcaaggctccaaaacatatttttaatatcccgcacttcgctcaaattcggcaattctccctgatacccctcaaactgaatggcgtcgctgtaaatatcaccgtacatgtaagcgcccgatttcaattcaagcaaaaaagcaaattcgatatccttaatctttgcgtttggcttatacgaagcaagcgcaatcgaaatacacgacatttcaagccccgcggcggccggacgcgttccgtctatcggatctacaattaaaatatattgcggatcttctccaatcagcttcaggccgccatcctccgtgtaaaaagcaaccggatggcccttatcttgaatataatccagcaccgcctcctcagcagcggcgtctatgttaaattgggcgtcgcctcccggagaatagccgtttacgagccggtttttcagcgtgcctttttgacttttcaccttatgataaacaaattgtccaagcccgatgatatagtctctcacttgatttcctccaatagcttgcgaagtctgtagcagagcacttctgcttcactaagtgtaatagttaaaggcggtcggattttaaaaacatttccgaacccgtaacgggatgtccggagaatcagcccgtaatccattgcccgttttgcaatataattggtcagctccacatccggttcattgttctcttttacaatctccacaccgatcataagaccgacgcctcttacctcagaaataaaagcgaaatcctctttcatcgtttctaagcgatccataatataatgaccgaccgtcgttacattttccaaaaatcccggacgctgcatgatatctatggttttacacgcggcagcggcggccatcacatttgagccgtacgtgaaggagtgcgtataccccggaagcccggtatacttgtcctccgtcagagtggcggcgacttggaagcctgtgcccccgagcccttttgctaccgtcatcatattaggtttcacatcgaagtggtccgcggcaaacattttgcccgtccgtccgaacccggtctgaatttcatcaaaaatcagggcgatatcgtgttcatcacaaagctgtctcagctgtttaaaatactctttaggcggaacgacgtttccaccgtttccggatatcggttcaataatcatggcggcaatttttccattgctcgcatactcaataaaatcattaattctttctacgcacagcataccgcatgaatcaggtttctgattataaaaacagcggctgcaatacggatcggggacttgaaggccaaaagaaatttgcggcgggaaaggttcttttctgaatgagttgccggacaaagcggaagtcatatacgtttgtccgaggtggcttcgaaataaggagatgacatcggtttttccggagtaatactgagccattttaatagctccttcatttgcaccggaaccgctgctgactttagggtgtacttttgtgagattatcgggggcgatttctactagtttttctgccagtttatttacggcgtctgtttgaaaagatgatgtcacatggatcagcttatcggcttgttctttaaccgtatcaatgacttctttgttaccgtatcctaaattcaagttaaatgtggcagaagcgcaatcaatgtactcattcccctcttgatcgtacaggtaaatcccttctccgcgctccattactacatcgtcaacactgtaatacaagctgtctggattcgtgatttccttcgttcccacaaataccacccctatgaaattattagaatttcgctttttatcgtattaattattgaaaatattgtcaacgatctttcttgtaaaaaatgttaacaatttgttaacgttaccataagggatgtacgagaaaaagttatgtgatatagtaacaatacttggattttttgtaaaaacgtcatgtcatacgagtagagagaaatattattttacgaataaggagataaaatgatgaaatctcgtctgctgtggataagctgtttttcttatggatcgattgcttttacacttgttattctgggagccgtactgcctgagttactcacacattattcacaaagctacagtaatggcggtgtattggtattctctcagttcatgggctttctcatcggtgttattggcatgccatacatggtgaaaaagcttgggcgcaaaaacgtcgttatctttggcctggcactcatcagctgcgaaatgttcatcaccttcctgccgccctggccgctgctctttcttctcgtcagcatcgcggggcttggcgccggattggtggaatcctgtgtaggcacgatcatcctcaccgctattaaagaaagacaggctgtggccatgagcaagatggaagtggcctacggattaggcgcgcttttcatgcctctgctctcaggctttcttatcaacaaccacatgtggacaattgcttttttagtattagggttatccagttttgcacttttaatcgcatggaagcagatgagtttcggcagtattgatcagcttctcatccgaaaagaggtctcttccgatgacactaaaaaagaaagcaccggttatcggtcacacggattgctgtttattgccttggcgggggcttacttcttcttttacggaggcagtgaagtttcaattgtacattttatcccctccattttctctgagaaatgggatatccccaactctttggcaacgataacagttacagtgtattggacggggatgatcatcggaaggttactaacaggcccggtatcagaaaagctgacatatcaccgttatcttcgtctcataagcattggcggtctggcagcacttaccgtattagcactaagtaaaaacgtatggttcggctttgccctttgcttctttttagggctgttcatggcaggcatgtttgcaatagccctaatcatcacgaatcatttttatcccggaaagacagaaacgactaccagtattctgctcgcttcaaacggattaggaggttcactccttccgatcgccgtcggctggagcttagatgaatatcccgcacaaactgcgttctggctgtttactgcactgatggtccttatgctgctgattgtgttcagtttaagaatactcgagacaataaaatcaaacaatcttcaaaatcacaacagcaaagcaaaatcaatgtaaacaaaaaagctaatgcctttgaaaggcattagctttatatatctatgtgatctttcaaataaaaaaaccagttcatcatgaactggtttaagacagcttggcggcgtcctactctcacagggggaaacccccgactaccatcggcgctgaagagcttaacttccgtgttcggcatgggaacgggtgtgacctcttcgctatcgccaccaaaccattgagagtgttctctcaaaactagataacagtaagcatacattcaaattggttaagtcctcgatcgattagtatctgtcagctccatgtgtcgccacacttccacctcagacctatcaacctgatcatctttcagggatcttacttccttgcggaatgggaaatctcatcttgaggggggcttcatgcttagatgctttcagcacttatcccgtccgcacatagctacccagcgatgcccttggcagaacaactggtacaccagcggtgcgtccatcccggtcctctcgtactaaggacagctcctctcaaatttcctgcgcccgcgacggatagggaccgaactgtctcacgacgttctgaacccagctcgcgtaccgctttaatgggcgaacagcccaacccttgggaccgactacagccccaggatgcgatgagccgacatcgaggtgccaaacctccccgtcgatgtggactcttgggggagataagcctgttatccccggggtagcttttatccgttgagcgatggcccttccatgcggaaccaccggatcactaagcccgactttcgtccctgctcgacttgtaggtctcgcagtcaagctcccttgtgcctttacactctgcgaatgatttccaaccattctgagggaacctttgggcgcctccgttaccttttaggaggcgaccgccccagtcaaactgcccacctgacactgtctccccgcccgataagggcggcgggttagaaggtcaatacagccagggtagtatcccaccgatgcctccaccgaagctggcgctccggtttccaaggctcctacctatcctgtacaagctgtaccaacattcaatatcaggctgcagtaaagctccacggggtctttccgtcctgtcgcgggtaacctgcatcttcacaggtactataatttcaccgagtctctcgttgagacagtgcccagatcgttgcgcctttcgtgcgggtcggaacttacccgacaaggaatttcgctaccttaggaccgttatagttacggccgccgtttactggggcttcaattcgcaccttcgcttacgctaagcgctcctcttaaccttccagcaccgggcaggcgtcagcccctatacttcgccttacggcttcgcagagacctgtgtttttgctaaacagtcgcctgggcctattcactgcggctctctcgggcttgcaccctaacagagcaccccttctcccgaagttacggggtcattttgccgagttccttaacgagagttctctcgatcaccttaggattctctcctcgcctacctgtgtcggtttgcggtacgggcacctctcacctcgctagaggcttttcttggcagtgtggaatcaggaacttcgctactataattcgctcgccatcacagctcagccttcacgggaaacggatttgcctatttcccagcctaactgcttggacgcggatatccaataccgcgcttaccctatcctcctgcgtccccccattgctcaaatggtgaggaggtggtacaggaatatcaacctgttatccatcgcctacgcctttcggcctcggcttaggtcccgactaaccctgagcggacgagccttcctcaggaaaccttaggcattcggtggaggggattctcacccctctttcgctactcataccggcattctcacttctaagcgctccacaagtccttccggtcttgcttcacagcccttagaacgctctcctaccactgttcgaagaacagtccgcagcttcggtgatacgtttagccccggtacattttcggcgcagagtcactcgaccagtgagctattacgcactctttaaatggtggctgcttctaagccaacatcctggttgtctaagcaactccacatccttttccacttaacgtatactttgggaccttagctggcggtctgggctgtttccctttcgactacggatcttatcactcgcagtctgactcccaaggataagtcatcggcattcggagtttgactgaattcggtaacccggtaggggcccctagtccaatcagtgctctacctccgagactcttaccttgaggctagccctaaagctatttcggagagaaccagctatctccaggttcgattggcatttcacccctacccacacctcatccccgcacttttcaacgtgcgtgggttcgggcctccattcagtgttacctgaacttcaccctggacatgggtagatcacctggtttcgggtctacgaccacgtactcaattcgccctattcagactcgctttcgctgcggctccgcatcttctgcttaaccttgcacgggatcgtaactcgccggttcattctacaaaaggcacgccatcacccgttaacgggctctgactacttgtaggcacacggtttcaggatctctttcactccccttccggggtgcttttcacctttccctcacggtactggttcactatcggtcactagggagtatttagccttgggagatggtcctcccggattccgacggaatttcacgtgttccgccgtactcaggatccactcaggagagaacgaagttttgactacagggctgttacctcctatggcgggcctttccagacctcttcatctacctcgttcctttgtaactccgtacagagtgtcctacaaccccaagaggcaagcctcttggtttgggctggtcccgtttcgctcgccgctactcagggaatcgcatttgctttctcttcctccgggtacttagatgtttcagttccccgggtctgccttctcatatcctatgtattcagatatggataccactccattacgagtggtgggtttccccattcggaaatctccggatcaaagcttgcttacagctccccgaagcatatcggtgttcgtcccgtccttcatcggctcctagtgccaaggcatccaccgtgcgccctttctaacttaaccgttaaaaagaatcactacgtgatatcttgcattactaattgaatgtgaattacttctgttatctagttttcaaagaacaacatctcgaagaatcgaatgatccttcaaaactaaacaagacagggaacgttctgtttataagacccgaggtcttatattccgttaaaatccttagaaaggaggtgatccagccgcaccttccgatacggctaccttgttacgacttcaccccaatcatctgtcccaccttcggcggctggctcctaaaaggttacctcaccgacttcgggtgttacaaactctcgtggtgtgacgggcggtgtgtacaaggcccgggaacgtattcaccgcggcatgctgatccgcgattactagcgattccagcttcacgcagtcgagttgcagactgcgatccgaactgagaacagatttgtgggattggcttaacctcgcggtttcgctgccctttgttctgtccattgtagcacgtgtgtagcccaggtcataaggggcatgatgatttgacgtcatccccaccttcctccggtttgtcaccggcagtcaccttagagtgcccaactgaatgctggcaactaagatcaagggttgcgctcgttgcgggacttaacccaacatctcacgacacgagctgacgacaaccatgcaccacctgtcactctgcccccgaaggggacgtcctatctctaggattgtcagaggatgtcaagacctggtaaggttcttcgcgttgcttcgaattaaaccacatgctccaccgcttgtgcgggcccccgtcaattcctttgagtttcagtcttgcgaccgtactccccaggcggagtgcttaatgcgttagctgcagcactaaggggcggaaaccccctaacacttagcactcatcgtttacggcgtggactaccagggtatctaatcctgttcgctccccacgctttcgctcctcagcgtcagttacagaccagagagtcgccttcgccactggtgttcctccacatctctacgcatttcaccgctacacgtggaattccactctcctcttctgcactcaagttccccagtttccaatgaccctccccggttgagccgggggctttcacatcagacttaagaaaccgcctgcgagccctttacgcccaataattccggacaacgcttgccacctacgtattaccgcggctgctggcacgtagttagccgtggctttctggttaggtaccgtcaaggtgccgccctatttgaacggcacttgttcttccctaacaacagagctttacgatccgaaaaccttcatcactcacgcggcgttgctccgtcagactttcgtccattgcggaagattccctactgctgcctcccgtaggagtctgggccgtgtctcagtcccagtgtggccgatcaccctctcaggtcggctacgcatcgtcgccttggtgagccgttacctcaccaactagctaatgcgccgcgggtccatctgtaagtggtagccgaagccaccttttatgtctgaaccatgcggttcagacaaccatccggtattagccccggtttcccggagttatcccagtcttacaggcaggttacccacgtgttactcacccgtccgccgctaacatcagggagcaagctcccatctgtccgctcgacttgcatgtattaggcacgccgccagcgttcgtcctgagccaggatcaaactctccgataaagtagtttgactgactacgcacatcgctgtgcgatttatttaaaactttgaattaacaggtacgttttgtcttgtttagttttcaaagatcattaccgcttgttgaagcagctttattatcttaccactcagcttcttttatgtcaacaactttttttaagttgtttccgaagctttttgttgttgtctgctgtccatcagcgacgtttaataatataccacggtgcttctctataaatcaagcattttttttaaaaagagaaaaaaagaaaaccagtatattatctttaaagcttgagaatggtcgggaagacaggattcgaacctgcgaccccatggtcccaaaccatgtgctctaccaagctgagctacttcccgattttaaaaaatattatggcgcgcccgagaggagtcgaacccctaaccttttgatccgtagtcaaacgctctatccaattgagctacgggcgcaatcaatttcacaatatcccgttgggataaaatggagcggaagacgggattcgaacccgcgacccccaccttggcaaggtgatgttctaccactgaactacttccgcaagtaaaagtgtaatacatggccagaatacagcttcagatagcggtaaaccgtattgttatttatactgttcattatgacaaaagtaattatatcaaggttttgataaaagtcaatatcgtttaacaattaattatgttaatctcttttgcatccttgaagaaaggcttcatcaggagacgcgctaaatacctacaccttaactggtacaatcagcaacaggtttttactgaactaaacaaaaaataacagttccataacattcggaaactgcttcagatcaacgtattttagataagcttccaagcgggctcgaaccgctgacctcttccttaccatggaagtgctctacctgctgagctatggaagcaatggctccgcaggtaggactcgaacctacgaccgatcggttaacagccgatagctctaccactgagctactgcggaatattataagcttcataaacaaaaacatggtagataaaataaaaagcttggcggcgtcctactctcacagggggaaacccccgactaccatcggcgctgaagagcttaacttccgtgttcggcatgggaacgggtgtgacctcttcgctatcgccaccaaaccattgagagtgttctctcaaaactagataacagtaagcatacattcaaattggttaagtcctcgatcgattagtatctgtcagctccatgtgtcgccacacttccacctcagacctatcaacctgatcatctttcagggatcttacttccttgcggaatgggaaatctcatcttgaggggggcttcatgcttagatgctttcagcacttatcccgtccgcacatagctacccagcgatgcccttggcagaacaactggtacaccagcggtgcgtccatcccggtcctctcgtactaaggacagctcctctcaaatttcctgcgcccgcgacggatagggaccgaactgtctcacgacgttctgaacccagctcgcgtaccgctttaatgggcgaacagcccaacccttgggaccgactacagccccaggatgcgatgagccgacatcgaggtgccaaacctccccgtcgatgtggactcttgggggagataagcctgttatccccggggtagcttttatccgttgagcgatggcccttccatgcggaaccaccggatcactaagcccgactttcgtccctgctcgacttgtaggtctcgcagtcaagctcccttgtgcctttacactctgcgaatgatttccaaccattctgagggaacctttgggcgcctccgttaccttttaggaggcgaccgccccagtcaaactgcccacctgacactgtctccccgcccgataagggcggcgggttagaaggtcaatacagccagggtagtatcccaccgatgcctccaccgaagctggcgctccggtttccaaggctcctacctatcctgtacaagctgtaccaacattcaatatcaggctgcagtaaagctccacggggtctttccgtcctgtcgcgggtaacctgcatcttcacaggtactataatttcaccgagtctctcgttgagacagtgcccagatcgttgcgcctttcgtgcgggtcggaacttacccgacaaggaatttcgctaccttaggaccgttatagttacggccgccgtttactggggcttcaattcgcaccttcgcttacgctaagcgctcctcttaaccttccagcaccgggcaggcgtcagcccctatacttcgccttacggcttcgcagagacctgtgtttttgctaaacagtcgcctgggcctattcactgcggctctctcgggcttgcaccctaacagagcaccccttctcccgaagttacggggtcattttgccgagttccttaacgagagttctctcgatcaccttaggattctctcctcgcctacctgtgtcggtttgcggtacgggcacctctcacctcgctagaggcttttcttggcagtgtggaatcaggaacttcgctactataattcgctcgccatcacagctcagccttcacgggaaacggatttgcctatttcccagcctaactgcttggacgcggatatccaataccgcgcttaccctatcctcctgcgtccccccattgctcaaatggtgaggaggtggtacaggaatatcaacctgttatccatcgcctacgcctttcggcctcggcttaggtcccgactaaccctgagcggacgagccttcctcaggaaaccttaggcattcggtggaggggattctcacccctctttcgctactcataccggcattctcacttctaagcgctccacaagtccttccggtcttgcttcacagcccttagaacgctctcctaccactgttcgaagaacagtccgcagcttcggtgatacgtttagccccggtacattttcggcgcagagtcactcgaccagtgagctattacgcactctttaaatggtggctgcttctaagccaacatcctggttgtctaagcaactccacatccttttccacttaacgtatactttgggaccttagctggcggtctgggctgtttccctttcgactacggatcttatcactcgcagtctgactcccaaggataagtcatcggcattcggagtttgactgaattcggtaacccggtaggggcccctagtccaatcagtgctctacctccgagactcttaccttgaggctagccctaaagctatttcggagagaaccagctatctccaggttcgattggcatttcacccctacccacacctcatccccgcacttttcaacgtgcgtgggttcgggcctccattcagtgttacctgaacttcaccctggacatgggtagatcacctggtttcgggtctacgaccacgtactcaattcgccctattcagactcgctttcgctgcggctccgcatcttctgcttaaccttgcacgggatcgtaactcgccggttcattctacaaaaggcacgccatcacccgttaacgggctctgactacttgtaggcacacggtttcaggatctctttcactccccttccggggtgcttttcacctttccctcacggtactggttcactatcggtcactagggagtatttagccttgggagatggtcctcccggattccgacggaatttcacgtgttccgccgtactcaggatccactcaggagagaacgaagttttgactacagggctgttacctcctatggcgggcctttccagacctcttcatctacctcgttcctttgtaactccgtacagagtgtcctacaaccccaagaggcaagcctcttggtttgggctggtcccgtttcgctcgccgctactcagggaatcgcatttgctttctcttcctccgggtacttagatgtttcagttccccgggtctgccttctcatatcctatgtattcagatatggataccactccattacgagtggtgggtttccccattcggaaatctccggatcaaagcttgcttacagctccccgaagcatatcggtgttcgtcccgtccttcatcggctcctagtgccaaggcatccaccgtgcgccctttctaacttaaccgttaaaaagaatcactacgtgatatcttgcattactaattgaatgtgaattacttctgttatctagttttcaaagaacaacatctcgaagaatcgaatgatccttcaaaactaaacaagacagggaacgttctgtttataagacccgaggtcttatattccgttaaaatccttagaaaggaggtgatccagccgcaccttccgatacggctaccttgttacgacttcaccccaatcatctgtcccaccttcggcggctggctcctaaaaggttacctcaccgacttcgggtgttacaaactctcgtggtgtgacgggcggtgtgtacaaggcccgggaacgtattcaccgcggcatgctgatccgcgattactagcgattccagcttcacgcagtcgagttgcagactgcgatccgaactgagaacagatttgtgggattggcttaacctcgcggtttcgctgccctttgttctgtccattgtagcacgtgtgtagcccaggtcataaggggcatgatgatttgacgtcatccccaccttcctccggtttgtcaccggcagtcaccttagagtgcccaactgaatgctggcaactaagatcaagggttgcgctcgttgcgggacttaacccaacatctcacgacacgagctgacgacaaccatgcaccacctgtcactctgcccccgaaggggacgtcctatctctaggattgtcagaggatgtcaagacctggtaaggttcttcgcgttgcttcgaattaaaccacatgctccaccgcttgtgcgggcccccgtcaattcctttgagtttcagtcttgcgaccgtactccccaggcggagtgcttaatgcgttagctgcagcactaaggggcggaaaccccctaacacttagcactcatcgtttacggcgtggactaccagggtatctaatcctgttcgctccccacgctttcgctcctcagcgtcagttacagaccagagagtcgccttcgccactggtgttcctccacatctctacgcatttcaccgctacacgtggaattccactctcctcttctgcactcaagttccccagtttccaatgaccctccccggttgagccgggggctttcacatcagacttaagaaaccgcctgcgagccctttacgcccaataattccggacaacgcttgccacctacgtattaccgcggctgctggcacgtagttagccgtggctttctggttaggtaccgtcaaggtgccgccctatttgaacggcacttgttcttccctaacaacagagctttacgatccgaaaaccttcatcactcacgcggcgttgctccgtcagactttcgtccattgcggaagattccctactgctgcctcccgtaggagtctgggccgtgtctcagtcccagtgtggccgatcaccctctcaggtcggctacgcatcgtcgccttggtgagccgttacctcaccaactagctaatgcgccgcgggtccatctgtaagtggtagccgaagccaccttttatgtctgaaccatgcggttcagacaaccatccggtattagccccggtttcccggagttatcccagtcttacaggcaggttacccacgtgttactcacccgtccgccgctaacatcagggagcaagctcccatctgtccgctcgacttgcatgtattaggcacgccgccagcgttcgtcctgagccaggatcaaactctccgataaagtagtttgactgactacgcacatcgctgtgcgatttatttaaaactttgaattaacaggtacgttttgtcttgtttagttttcaaagatcattaccgcttgttgaagcagctttattatcttaccactcagcttcttttatgtcaacaactttttttaagttgtttccgaagctttttgttgttgtctgctgtccatcagcgacgtttaataatataccatgcatcggctgaatttagcaagtatttttttcgtttttttttgaaacgtatttcgttatattcatctccgccgcggcatacgatgtaatcaagcatggacaagataaggaggcgtcaccagtgaaccacttctacgtgtggcacatcagaaggataaaacagctgcttattattatcattgccgcatttgcagcagccagctttttttatatacagagagccgtcccccttcctgtatttttaactgatagcggcccgaaggctatttcaaaaggggagacgaaagcgggcgaagtcgcattaacattcgatatcagctggggcgatgaaaaagcggttccgattctgaacgcgctaaaagcaaacggtattaaaaacgccactttttttctgtcagcttcttgggcggaacggcacccggacacagttgaacgtatggtaaaagacggacatcaaatcggcagcatgggatatgcgtataagaattataccaacctagaggacaacgaaataaaaaaagatatccttcgggcccagaccgcatttaaaaagctgggtgtgaagaatgttcatttactccgcccgccgaccggacaatttaataaaaaggttcttgccattgcacagcagtaccgctattcagtggttcattacagcgttaactcgcaggattggacaaatcccggtcctgataaaatcattgaaaatgtaaacagtcatataaaaggcggcgacattgtcctgctgcacgcctctgattcagcaacacagaccgaagaagcgctccccgccatcattcacaatttaaagcaaaaaggactgaaaaacgtgacagtcggcgacctgatcgcaaatactgacgtcaagtcatcagaagtgaaataactacctctgggcaaacttcggcagcattaacagctgaaacgcattgcagcccatcagcggaatcagcatcaaataaagccagtcctcattattcactcttagcgcaggaacccattcaagcgctgtaataacgaccattaaaaataatgatgaaacgaacgtattttttgaggactgcttttgttttatatacgccgtcagcaagccgacggcaagcagagccagcggcagccagacaaaccccgcaatcgagtcatcccgctcaccgaaaaacaaaaatctgacgtacattaaatcaaaagcgacaaacagaatgataaacagctgaagcagattccaaagcgagtttgatctgaggatttcaagggcaaaccggtgcaccgtcagaaagacgaagaatcccatctggctgatcacactgaaaatcatgcctaccccgataaaccagatcagaacggagaaaatttgaccggcctcaaaattcagaaagaaccccttgtactccccccacttcagtgcaaatcccacgacgcttgtaataagagcgcccacagctaaaatcgaaaagaaaaatcgaacaagcccgcggcttttcatctcttattcatccccctgacaatcgcgttcagcgatattttgttatgtataaatccattccgatgaatcatattaaaaataagtacaagtaaggaaggagcttatgcatgtcaaaagccaaaacgctattgataagctgttttgttgtattatctgtaacagcttgtgctccaaaagaccaagcagcggatatggattatgaccagactaaaaaaatggttgttgatatattaaagacagatgatggaaaaaaagcaattaaggaaatattaaatgatgatgcgatgaatgaggcattggtgattgatcaaaatgccattaaaggcacaatagagaaaaccctcacctctaaaaaaggggcggagttctggaaaaccatctttgaagactcaaagttcgccgagagctttgcaaaaacgcttcagcccgagcacgaaaaaatcataaaaaaattgatgaaagaccctgattatcagaaaagttttatgcagatcatgcaggaccccggcatggataaaaaatactatgagctggtgaaaagccaaaagttccgcagttacttagaagatgtaattacagagacactttccagcccgcttttcaaaaagcaattcgaggatgaattgaaaaaagcggcttcaagttctgaaaaagaaagccaataaaaggccgggccgtgttgatcccggccccttttttattcagctgttttttcaatgactttttgggcgatacccatataaatttccccgatcggatgacttctgtcatagacagaaggcgcaaactggtccttgtcccaatcaggctgttttaaaggaattctgccaagcagcggcacctgcaattcctctgcaagcttatctcccccgccttgaccgaacacatattctctctcgccggtttttgcactttcataataagccatattttcaatgacccctacaacttcatgatcggtcttaatcgccatagatcccgctctcgccgctacaaatgcggctgtagggtgcggcgttgatacgataatctctttgcagctcggaagcatcgtgtgtacatcgagcgccacatcacccgtgccgggcggcaggtcgagaacgatatagtcaacctctccccagtcaacctcatggaagaagttattcagcatcttgcccagcatcggccctctccacacaaccggagcgttttcttcgacgaaaaagcccatcgacataacctttactccaaatctttcgacaggaagcagtttttctccttcaactgtcgggcgaactgtaatacccatcatgtccggcacgctgaatccgtatatatccgcgtcgatcaagccgactttttttccgagccgcgcaagagaaatggccaggttgacggaaaccgttgatttgccgacaccgccttttccgcttgccaccgcaagaaagaccggcggatgtttcctattcagcagggtttcgctttcagcagcaggccggctgaatttcgccaatgtttcttccggcagctcttcaaaccgaagtcccacagtttccgcacccgcttctttcagaacggatacgatttcctgctgaatgcccatctgttcagccgtccccgtttttgccaatgcaatttttacactgacatgccgtttttccggcttgacctttacttctttaatggcatccaattctcccagcggtctatgaagaaaaggttcgcgcatgtttccgactatatttcttacttcatcttctcttatcatcgaaccctcaccctttgtgtattcgtttacaaatggtattataccatatattaaacgtagaatcggcgaaaaaccctccttactcgggagggtctcctttttctgtaaaatatctcaacacgcccttatacacggaagaagcgattttgtcctgatatttaggctggccaagccttttcgcttccgcgggattggacagaaatccgatttccaccagggcgcccggtttggttacattctgcattaagtaaatgccgtgtatccgtttcgcctttctcgttgtattctccaaattgattctcaattcgtcctgtatatattttgccactttttcattctcttcgtattttccatagtagaagctttgggcgccgctccatctcggtgacggtatggcgttcagatgaatgctgatataaagctccgcctctgaacggttgatgatctccacgcgctttctcagatcttccgctttgcgtctgctgtagcctttcgtcccttcaggagctaaatcagtatccgtctcccgcgtcataatgaccaaagctccctgctcctgcaaatagtctctgaccctggaggccacttcgagagtaatgtccttttcaaggtgactgcctcccgtggcgcctccgtccggcccgccgtgtcccggatcgagatagatgattttcccgctcagcggcaggctccacggccgccatgaatcatcattatggaattgaaaccggaataaacacaataatatgataaagccaagtaaaaaaccgagccatttcagcttttttgtcatagctttccctcccgcttgtccccgttattaataagtatgggacaagggaagaaattatgattacctcatgcggagcttacattgtttttctctttgcagaaatccttccgtccaccagctgttgataaaccggcaggacgcttcatagatttctttttgttcaacggaagaatattgctcatgcgtccaattgcaaagatattcaaaaaaatcggccgtcagttcttcctcttcttcagccgaacgggcgttcgccctctgcaaagactcaccataaaatccaaagacgccgaaccggccgcctaataaatacgcttcaattgcaaaatctatgcatccttcactcagaatgccgttttcgtcttgaagaaagggaaacaaaggggtgagacatgcttttacggactgaatgatctgcgtcagtgacagctcctttagtaaactcttctcaagctcataatccttctgccgtttcacgtctgaaaaagataatacttctgccattgccagccacgctcctttttactgttattttgaaaggaaaagggaaaaagcatgctttgttgatagtggaaatcctcccaaatgaaggagtttcatgttaactggaagaataaagagctgaggtgacgtgatgaaaaagctgtttcaatacaattggacggtgcgtgacgagtggtttatgatatgtgaaaagctgagccgggaggaactgacgaaaacccggacgggcggaatggagagcatcttgcggactttatttcatatcattgatgtcgagatcagctgggctcgtgccattttaggtaaagatgatgttttacccgctgagtctgactatacgagcattcaggatctcagaaagctgtctgaacagtatcgggaggatgtcattcatgcggtctcccgcaaaggggcggatcttgttaagccggactggatggaccaaacctttcctaaagaagatattctccgccacatccttgcgcatgagattcaccacatgggacaactgtcggtttgggccagagagattggaatagaaccggtttcggctaatgtgatcagccgtccgcaggaaaaagccgcaaaaaaacagcacctctgacgggatgccgtttttatattttaatgcttcttgttacggagtatgtattaatgtattcatccagcacgaggccgcctttgtcctcgtaaaaaccggcaaccataaagcctgcgtcaatctgacctttaatttgatcctccagcgtatggccgaattcaagcgcttcatgattatcaataagttcctttacctttttcttactcagatctttttcatccgaaaacggaatggaatactttacttttagtacgccttcctgctctaaatccatatcaaataagaacacgacgggatttacaaaaccggagactaaagacccgccttttttcaatacgcgataagcttctttccataccggaagaaccgtatcaacaaagcaattcgataccgggtgcacgataaaatcaaatgtctcatcatcaaaacagctcagatcattcatgctgcctttgacagtccgaagcgtaagaccgtcccgctgggcaaccattctgtcttgcgcaagctgtttttccgaattgtcaaagatggtgacgtccgctcctgcagcagcaaggaccggcccttgctgtcctcctcctgaagcgagacaaagaacctccagaccgtctatgggcggaaaccaatccgccggcacatcttttccgggggtcattctgatgctccaattgccttttttcgcttcaccaattgtatgagaatcaaccgcaaccgtccattcattgcctgtttcgacttttttatcccatgccttgctgttatgtatgactaacttattcattataactgcgctccttattggtaatgaatagagtataacaaacaattctagaaaaacatcggataacctcttcgatatgagaaaaaaatacaaaaaaaccacaaccaagaagttgtggtttttgccatccaaaacgattaacgttttgagaactgaggtgcacgacgagcgcctttaagaccgtattttttacgttctttcatacgggcgtcacgagtcagaagaccagcacgtttaagtgttgcgcggtattctggatctgcttcaagcaaagcacgagcgataccgtgacggattgctccagcttgaccagataagccgcctccatgtacgtttactaaaacatcataagtaccagctgtttcagttaaagttaatggttgtttgatatcttcgattagagccggagatggaatgtgctcgctgatttcacgattattaacgacgatacgaccttctcctggaactaagcgcacacgcgctacagaacttttacgacggccagtaccgtaatattgaacctgtgccaaattggtaacctcctttttaattaaccgcgaagttcgtaaacttcaggtttttgtgcttcatgtggatgctcagaaccacggtatacgttcaatttcttgaacatttgacgacctagagaaccttttggaagcatgcctttgatagcaagctcaagcattttctcagggtagtttgtacgcatttcaagagctgttcttgatttcagaccgcctgggtgcattgtgtgacggtagtagattttatcagttaactttttaccagttaactcgattttttcagcgttgatgatgatcacatgatctccagtatcaacgtgcggtgtgtaagtcggtttgtgtttcccgcgaaggatagatgcaacttctgtagaaagacgtcctaaagtcttgcctgctgcatcaacaactaaccacttgcgttcaatagtacttgcgttagccataggtgttgtacgcatttaattccctcctaaatgatctgtcattttttcataaacttctgttacgttctatttcacaacacaataagttccggggcttatcgtggggttgaaatacataccatatgatatcttataactttatgcagactctgtcaagaaaatgttacacctggtttagttgtcatagcaaacgctccataaatacagcccgtgccccggtgcggtgcgccccgcggcttcgcgatccttcgcttcgagcattgcttttacatcatcgggagaaaattttccagctcctgtatccaataacgttccggcaatgattctgaccatattatagagaaaaccgtttccggtgatccgcatctgcaggccgtctccggtctcagtccaatccagctcgtaaatcgttctgaccttatcctgaaccgcggtatcagccgcgcaaaagcttgtgaaatcatgtgtcccgatgaggtgccttgaagcttccctcattttctgcacattaagctgatatgcaaaatggtaagcgtaatgtcgtttaaatacgtccgggtgtttctccgtatatacaaagtagcgatattccttttggactgcgctaaatcgtgcatggaacccatcatccgcaatctctgctgttttgacggcaatatcatcaggcagcagggcattgagcgcaaacggccatttctcagccgggatggacagcggcgtatcaaaatgaataacctgcccggcagcatgaacatcgctgtccgtgcggcccgatgagatgacaggcaccctgccgtccgttttatggatgacggccagcgctttttccaattcactttgaacggtccgctttccaggctgaacctgatatccgttaaataaatgcccgtcataagcaatggtacatttcactctcattcagcagcacctctaacttcttaagaaaaacaataacacggctaatacgatgatgagcagaatggctccggtatcctttccggtccagacgagctttctgtatttcgttctcccctcaccgccctggtagcctctcgcctccatggcgaccgcaagctcttccgcgcgtttaaaggcgctgacaaacagcgggacaagcagcggaacaaccgctttgattctgtctttcaccgggccgcttgtaaagtccgcacccctcgccatttgcgccttcatgattttatctgtctcttccatcaatgtcgggataaatcgcaatgatatcgacatcatcaatgcgagttcgtgtacgggcagcttcacctttttaaaaggattcaagagctgctccattccatccgtgatttcaatcggcgttgttgtcagcgtcagcagcgttgtcataaagataaggtaaacgaaacggagggagataaaaatcccctgtataagtccgccctcatacactttaaaccagccaagctgaaaaatgacagatccttcatgcgtcatgaaaatgtgtaataaaaaggtaaacgccacaatccagataatcggcttaagccctttcagcaaaaagctgaacggcactcgtgttaaggcgatcaccccgaatgtaaacaaaccgagcaaagcatacgtttgtacgttgtttgccaaaaaaacgatacatacaaaaagaaagatgctgacaagttttgttcgcgggtccaatcggtgaataagcgatgatccgggaacatactttccgataatcatgctgtccatcattggtccttttcctcctgaaagaaagccttaatttcgctcgcggcatcctgcagggtcagcatgggtttttcatacttaactccgagagcctcctcaagccgtctctgaaacttcaccgactcaggaagatccagtcccatttcggccatctcttcaccttttacaaacaagtcacgcggactccccgtcgctttaatggtgcctttgtgcatgacgatcatttcgtcagcatagcgggcggcgtcctccatgctgtgggtgacgagaacggtagtcaggtttccccgctgatgaagcgcatagaacatgtccataatgtcctggcgccctctcggatcaagaccggctgtcggttcatccaaaaccagcacttccggctccatcgcgagaacgccggcaatcgccactctgcgcatctggccgccgctgagctcaaacggtgaacgatccaaaatgtcttccggaaggcccacaagccccagcatttcttttgctttccgttcagcgtcttctttttttacaccgaaattcatcggtccgaatgcgatgtccttcagcacagtctcttcaaacagctgatgttcgggaaattggaaaacgattccgactttttttcgcagagtcttaaggtctttattctttttaccggctgccagaatcgtgctcccgagctcaagctgtcctttagtcggtttcagcaaaccgtttaaatgctgcaggagcgtcgatttgcccgaccctgtatgtccgatgacggcaacgtagctgccctcttttatcacggcattgatatcatacagagcaagccgttcaaacggtgtcttcatttgatagcggtgttctacatctttgattttaatgtccacagctcattcaccagcccttcctgagtcagatggtttttcgttaacgccagtccgctttctttcaaaagcaggctgagctggaatgagaaaggcaaatcaagaccgatgcgaaccaagtcttcatttaatttaaaaatctcttcaggcgtgccctctgcatatttcctgccgccgttcatcacaatgatcctatccgcccttgcggcttcttccaggtcatgtgttatcgaaatgacggtggccatgccctgatcttttaagcgtctgacagtatcaaggacttcttctctcccaatcgggtcaagcatggatgtcgcttcatccaaaatcataatatcaggacgcgcggcaataattcccgcgatcgccactctttgtttttgacctccggagagatggtgcggctcttgatcaagaaaatcctgcatattgacttgtgtgacagcccaatctactctctcaatcatttcttcgcgcggaacaccattgttttctaaaccaaaagccacatcatcgcgaacagtcgttccgacaaattggttatcgggattctgaaagaccatccctattttttttcgcacatcccacacggtatcctcagtcagcttgatgccgccgacttcaatttctccggcctcaggcaaaatcagcccgttcagcgctctggccaaagtcgacttccctgaaccgttgtgacctacgatagcaagccattctccttcatatacctccagactcacaccgtccagcgccggtcttactgcatctttgcggtagcggaatagaatgtcttttacggatataagctgtttttgatccacgggcgcctgacctcctctcagctatagctctgcttttctgtctcatgataaaaagttctgatatctaaaaaaagggcatagatccagttagaaactgtcccgcccttctttagatacacaaaaatatgtgattaaaccaattcgatgattgccattggtgcaccgtcaccacggcgaggaccaagcttcataatacgtgtgtatccgccttggcgctcctcgtaacgagttgcaatgtcagagaataatttttgaagtgcatcttggttattttcttcattagcaacctcgttgcgaatgtatgcagcagcttgacgacgagcatgcaagtcaccgcgcttaccaagagtgatcatcttttcaacaacagagcgaagttctttcgcacgtgtttcagttgtttcaattctttcgttgatgatcaaatctgttgtaagatcacgaagcatagctttacgctgtgaactcgtacgtcctagttttctgtatgacatgtgatgtcccctcctttaatggaatgctgtttctaattaaaaaacacacgaaaatcctagttcacatggaaactagatcaatcgtctttgcgaaggccgagtccaagttcttcaagtttcgctttcacttcttcaagtgatttgcgtcccaggttgcgaactttcatcatatcttcttccgtcttgttcgcaagttcttgaaccgtgttaatgcccgcacgcttcaagcagttgtaagaacggacagaaagatcaagttcctcaatcgtcatttcaagaactttttctttttgatcctcttctttttcaaccatgatttcagcatgctgagcttcgtcagttaaaccgacgaatatattaaggtgttcagttaaaatctttgaaccgagagcaattgcttccttcggtccagtgcttccgtcagtccaaacatcaagtgtaagtttgtcatagtttgcaacctggcctacacgagtgttttctacctgataagataaacgagaaactggcgtaaagattgaatcgatcggaatcacgccgattggctgatcgtctcttttgttcgaatcagcaggtgtatacccacgtcctctttgtgcagtaaggcgaactcggaaactcgcattctcaccaagagtcgcgatatgaagatccggattaaggatttcaacatcgctgtcgtgtgtaatatcagctgctgtgacagttccttcgccctgtacatcaatttcaagcgtcttctcttcatcagagtagattttcaatgcaagctttttaatgtgcaagattatcgttgtaacatcttccacaacgccttcgattgtcgagaattcgtgcagtacaccatctatctggatcgatgttacagcggcaccagggagtgaggataagaggatacgacgtaaggagttacccagagttgtaccatatccacgctcaagcggctctacgacaaacttaccaaatttggcatcgtcgctgatttcaaccgtttcgatttttggtttttcaatctcgatcattacttaaaaccctccttcaaaacgtcgaaacctcgaatagaatcatatgagattccatccgaaattccccattgtttagtcccgtatgtgctcaggcaacgagtcggtgcattcgtttcataaataactgtatcataacccattattgacagggacacaaaatctatacaaacaaattacacgcggcgacgttttggtggacggcatccattatgaggaacaggagttacgtctctgatagctgtaacttcaagtccggcagcttgtaaagcacggattgcagcttcacggccagaacctggtcctttaacagttacttcaagagttttaagtccgtgttcgattgaacctttagcagctgtttcagcagccatttgcgcagcaaaaggagtcgatttacgagaacctctgaatcctagagctccggcacttgaccaagaaatagcattaccatgagtatcagtgatcgtaacgatcgtgttgttgaaagttgaacgaatatgagcgattcctgactcaatattctttttcacgcgacgtttacgcgtgttttgtttacgagcagcagccattgtttaggtacctcccttacttattttttcttgttagctacagtacgacgcggacctttacgagtacgcgcattgtttttagagttttgtccgcgaacaggcaaacctctgcgatggcggattccgcggtagcttccgatttcgatcagacgcttgatgttaagagaaacttcacggcgaaggtcaccttctactttcagtttgtcaataacatcacggattttaccaagttcttcttcagtaagatcacgcacacgagtatcttcagaaacaccagcctctttcaagacttgctgagccgttgtgcggccaattccgaagacatatgttaaagaaataacaacacgtttgtcacgtgggatatctacaccagcaatacgagccattctctgggcacctccttattaattatccttgtttttgtttatgctttggattttcacagatcaccattacttttccttttctgcgaataactttacatttctcgcagattggtttaactgatggtctcactttcatgtgtttccaacctccttcagtttccggagtgctttatttgtaacggtacgtaatcctgccacgagttaagtcatatggagataattctaccgtaactttgtctccaggtaaaatgcgaatgaagtgcatgcggattttaccagatacgtgagccaaaaccgtatggccattttcgagttcaactttgaacatcgcgtttggcagtgtttcgacaatcgtaccttccacttcaattacatcgtctttcgccattcaagtgttctcccttcttcaaatcagtaacttgctctctgacaaatttcaaaagagaaaatctcagttatccgtttgtcacacgccctgtttcgtttatactgttctgaacttccggagatacgcaatcataaagggtgaatgattgatattctttttctaaggagaatgaaatgtacgcttttctccgtctgctttagtacacgatgatgaatcttccttccgatgacagcagctagccggtttttcttccgaccaattgtaaacctacaatctgcccaggtgcggaatgaaaaacatgtgtcatggaattcatttcatcatctagacttttgtcagtatatcaaaacccgtttccgtaatcgcaatcgtatgttcaaaatgagcacactttttcccatctaccgttacaaccgtccagttatcagccaatgttttcacataccggctgccagcgttaaccatcggttctatagcgagaaccataccaggcttcagcctaggtcctttgtttggcggaccgtaatgaggaatttgcggatcctcatgcaagtcttgaccaacaccatgtccgacatactccctaacaactgaaaactgctcattttcgacatacgtttgtattgcgtgggaaatattcgacaaacgttcacctggttttgcttccttcaagcctttatataaagactcctctgtcacttccagcagtcgtttatcatcatcactgatgtttcctaccggatatgtccaagcagagtcaccatgataaccatttaatttagcaccgatatcaatgctgataatgtcaccgtcacgcaaaacccttttaccgggaattccgtgaacgagttcttcattaactgatacacagatgctcccgcgaaacccattataccccttaaaagatgggattgcaccctgcttctcaataaaacgttcggcaatttgatccaattcttttgtcgagattcctggtttaatgtgctttttcatctcttcatgagtcaaagccacgattcgccctgcttcccgcatgatgctaagctcacgaggggtcttacagataatcatttgctcaatcctccaagaagctctttcacatctttgtacacgtcgttaatgtcctgctggccattgacgttgacaagataccctttctcagaataaaaatcgagtaaaggctgagtctgcttcatgttgacctcaagccgttttgagacggtttcctcattatcatctgcccgttgataaaggtctcctccgtctttatcacaaacacccggcgttttcggcggattgaaaaccaaatgataggttgtgccgcaaacactgcaaattctgcgtccagtcaaacgttccattaaagagtctttgtctactttaatgttaatgacataatcaatcggcttgccgtattcctcaagaatgttttcaagagcttcagcctgagcgactgttcgcggaaatccgtccagaagaaaacctctttcacaatcatctttgccgagtctttctttgacaatgccgattgtgacttcgtccggtacgagctcgcctttatcaatataagactttgcttcgagtccgagtggtgtttcttctttcatagcagcacggaacatatctcccgttgagatatgaggtatcccataatcctcaacaattcgttctccctgtgtgcctttaccggctccaggaagtcccattaagactaagttcattcggatttcccccgtcctctcttatttagaggaatggttaaaaccagtcctctaatttttcataaatcctcggtaattacgtttcactaactggctctccagctgcttcattgtctccaaggctaccccgacgacaattaacaatgatgttccgccaatctgtgcactttgaggcaatccagcgaattgaatgaaaaagataggaagaatggaaatcacggctaagaatatagaacccacaaacgtaagtcgatacaaaatgctcgtaattctatcttgagtcattttccctggacgaacccccgggatatagccaccctgtttttttaggttatcagccatttgttcagggtttacctgcacaaaagcatagaagtacgtaaaggcgataattaatgcgacataaaccgtcatgcccaccggatgtgtattgtcaaagttggcttgaatccactttgtcacatcgttttctccgaaaaatgacgcgatagtacgcggcgtaataaggaacgcaaccgcaaagattaccggaataacccctgccggattcactttaagcggaaggtgagttgactggcctccgccaacaggtgaacgaccttgcccttttgcatattgaatcgcgattttgcgtacagcctgctgaatgaaaataacaccaacaataacggctaaaatcgcaatcaccagtaaagcgattttcacaatatgaataaacagctgatcgctgctgccgacaaattgagtctcataaatctgcccaacagttttcggaatactagccacaatccccgcgaagatgatgatcgaaattccgttacctactccattggaagtaatttgttctcccagccacattaaaaaagcagttcctccagtgagtactaaagcaataatcagatatgtcgatatgccggatttttcaatcagcataccgtttgccaggttgttaaacccgtaagacatacctaatgcctggataaaaccaagcacaatcgtaaaatatctcgtgaactgagctaatttacggcggccgacttcaccttgcttagaccactcggtaaacttcggcacaacatccatctgaagcagctgaatgatgatcgaagcagtgatgtaaggcgtaattcccatcgcaaaaatggagaactgataaagcgcaccgccgccaaatgtgttaaggagatcaaaaacccccatcgaactttgtgtctgcaacgcctgagcatttacatatggcacagggataaacgcacctatgcgaaagacgataagcatgagtaatgtaaaaatgattttattccgaatatcactcacacgcataaagttggagattgtcttaaacaagttagatcacctcagctgtaccgccagcagcttcaacagcttctttcgcagaagcagagaatttattggcttttacagttaattttttctctaatttaccgttgccaagaatctttactcctgcattaagtttgctaataacaccagtctcaagaagaagttcaggagtgacttccgttccttccgcaaaaccgttcaatttgtctacgttcacaatagcgtattccttacggttgatgtttgtaaaaccgcgcttaggaagacgttggaataaaggcatttgtcccccctcgaatccagggcgtacaccgccgccagaacgagcgttttgacctttgtgacctttaccagctgttttaccgttaccagaaccaataccacgacctacgcgattgcgtactttacgtgaaccttctgaaggctttaattcatgaagtttcattaggacacctccttagcctataatttatttttattgttctttaacagaaactagatgagatactttattaatcataccgcggatcgcagcgttatcttcatgaacgacagtttggtttgttttctttaaaccaagtgttcttacagtaacgcgctgatcttccgggcgaccgattacactgcgtttgagggtaatttctaatttagccattaatgttccctccttatcctaacagttcttctacagattttccacgaagcttcgcaacctcttcggcacgtttaagctcacttaaaccttgaagtgttgcacggatcatgttgatcggtgtgttagaacctaaagacttagaaaggatatcagcaacgccagcaagctcaagtaccgcacgtacagggcctccagcgataactccagtaccttcagaagcaggtttcaacaagatattgcctgcaccgaaacgtccgatgatttcgtgtggaatcgtagttccaaccattggtacttcaatcaaattctttttcgcatcttcaacagctttgcggattgcttcaggtacttcttgtgctttaccagtaccgaaacctacgtgaccgtttttgtcaccgacaacgactagagctgcgaaacggaaacgacgaccacctttaacaactttcgctacgcggttaaccgtaactaagcgttcttctaactctaatttgcttgggtcaatacgacgcataatcatgtgtccctcctttttttattaaaatttcagtccggcttcacgagctgcatcggccagagcttttacacgtccatggtataagtatccgccgcggtcaaatactacgtcagaaacacctttctcagaagcgcgtttcgcaacgagttcaccgactttagcagcagcagcgctgtcaccagtgctttccacgttcaaatctttatcaagagtagaggcactagcaagtgtaacgccatttacatcatcgatgatttgagcataaatgtgtttgtttgaacggaacacattcagacgaggtctttcagctgtgcctgaaagtttagcacgaacacgggcatgtcttttttgacgagcagcatttttgctagttttcgtaatcatccttaggtcactcctttcttcactttaagcggtcttacttagcagatttaccttctttacggcgaacaacttcaccttcgtagcggattcctttacctttgtaaggctctggagaacgtacagcgcggatgttagcagcgatagctcctacacgctctttgtctgtaccttttacaactactttagtttgagaaggaacttcgatttcgatgccctcttcaggaacgatctcaacagggtgagagtatccaacgtttaaaacaagtttgtttccggatttagccgcacgataaccgacaccgactaattccaaacctctttcaaatcctttagatacgccttcaaccatgtttccaagcagactgcgagtcgtaccatgcagcgcacggtgctctttgtgatcagaaggacgagtaactgtaagcacgttgtcctcaattttgatttccatatcaggatggaaagtacgagttaattctccttttggtccttttacagctacagtgttgccttcgttcagcgttactgtaactccagaagggatctcaagcagttttttacctacacgagacatactaaaacacctccattcttgttaaacttcttaccaaacgtatgctagaacttctccaccagcttgttttgcacgggcttctttgtccgttaaaacaccttgtgatgtagaaataatcgcgattccaagaccgttaagtacgcgaggtacttcatttgatttagcgtatacacgcaaacctggtttgctgattcttttaagaccagtgataacgcgctcgttgttttgtccgtatttcaagaaaacgcggatgataccttgtttgctgtcttctacgaactcaacgtcacgaatgaaaccttcacgctttaaaatgtcagcaatttctcttttcaatttagaagcaggaatttcaagcttctcatgacgtaccatgtttgcattgcgaatacgagtcagcatatctgcaattggatctgtcataaccattatataattacctccttcccattcttggggattaccagctggcttttttcacgccaggaatttgtcctttatatgcaagctcacggaaacaaatacggcaaagtttaaatttacgaatgactgagtgcggacgtccgcagcgttcacagcgagtgtactcttgcactttaaactttggtgtacgttgttgtttcgcaatcattgactttttagccacgatttcgcctccctttcattgattatttctggaacggcatacctacttgagttaatagctcacgagcctcttcgtcagagttagcagtcgttacgataacgatgtccattccgcgaacctttgttactttatcgtagtcaatttcagggaagattaactgttctttgataccaagagtgtagtttccgcgaccgtcgaaagatttcttagaaatcccgcggaagtcacgtacacgcggtaaagatacagaaataagtttatcaaggaaatcatacatgcgctctccgcgaagagttactttcgcaccgataggcattccctcacgaagacggaatccagcaattgatttcttcgcacgagtaacgacaggtttttgacctgcgataaacgttaattcttcaacagcactgtcgattgcttttgcgttttgaacagcatcaccgacacccatgttgattacgattttttcgatttttggcacctgcataacagagtcgtagttgaacttcgtcattaaagcaggtgaaatttctttattgtacttttctttaaggcggttcatgagatagacctcccttcctttaaatactatttatctaagacttgcccagatttttttgcaacacgaacttttttgccatcttccactttgtatcctacgcgagtcacttcaccagttttaggatcgagcggcataacgtttgatacatgaattggcgcctcttgattagaaataccgccttgagggtttgcttgagttggtttagagtgcttcttcaccatgtttacgccctcaactagaacgcggtcctttttagggaaagcagcaaggatcgtaccttgtttgcctttatctttaccagagataaccattactttatcgccttttttcacatgcatcctgatcgcacctccttgagtaaggcatttatttcattagataacttctggagccagagaaacaattttcatgaagttgttttcacgtaattcacgggcaaccggtccgaagatacgagttccacgcgggctcttgtcgtcacggatgataacacatgcattctcatcgaagctgatgtatgatccgtcagatctgcgtgctccgctttttgtgcgaacgataacagctcttacgacttcaccttttttgacaacgcctcctggtgttgcttgtttaaccgtgcaaacaattacatcaccaatgttagccgttttacgtccagaaccgccaagaactttaatagtaagtacctcacgcgcaccggagttgtcagcaacttttaaacgagtctcttgttgaatcattatttgttacctcccttcggaaaaagaattccgaactttattagataataacagcttcttcgacaacttctactagacgaaaacgcttagttgcagataatggacgagtttccatgatctttacgatgtctccgattttagcttggttattttcatcatgtgctttgaatttctttgagtattttacgcgtttaccgtaaataggatcctttttgtatgtttcaacaacaacagtgatggttttatccattttgtcagaaacaacacggccttggtaaactttgcgttggttacgttcgctcatgctcacgacctcccctcagtgattatttgttggcagcaatttctctttcacgaatcacagttttcatgcgcgcgatagctttgcgcacttcacgaatgcgagcagtattttcaagttgtcctgtcgctaattgaaagcgaagattgaaaagttcttctttaagagactttactttttgttcaatttcagcagtggtaaggtcacgaatttcattagctttcatttgattcaccaccaatttcttcacgttttacgaacttcgttttaattggcaatttgtgagatgcaagacggagagcttcacgagctacctcttcagacacaccagaaatttcaaataaaactttgcccggttttacaacagctacccagccttcaggagcccctttaccggaacccatccgtacctcaagcggtttagcagtgtaaggttttgaagggaaaattttaatccaaactttaccgccacgtttcatgtaacgagtcatcgcaatacgtgcagcttcgatttggcggttcgtgatccaagaagcttcaagagcctggataccgtactcaccaaaatgtacttcagtaccgcctttagcgcgaccgcgcatttttccgcgatgctctctgcgatatttaacgcgttttggtaataacatattattttcctccttcctcagttttcttcttagtaggaagaacctctccacgatagatccagacttttacaccaagcttaccgtaagttgtgtcagcttcagatgttgcatagtcgatgtcagcacgtaaagtgtgcaatggaacagttccttcactgtagtattcagaacgagcgatatcagctccgccaagacggccggaaaccattgttttcacaccttgtgctccagcacgcatagtgcgttggatttgttgtttctgcgcacggcggaaagaaatacggttttctagttgacgagcgatgttgtcagctacaagctgagcatcaagatctgctcttttgatttcaagaatgttaatgtgtacacgcttgccagtaaggctgttaagggctttacgaagtgcttcaacttcagatccgcctttaccgattaccataccaggcttagcagtgtggatcgtaatgttaacgcggtttgctgcacgctcgatttctactttagaaacagaagcgtcagaaaggcgtttgctaatgaattcacgaatttttaaatcttcgtgcaggaagtcagcgtaatctttaccagcgtaccacttagattcccaatcacgaatgactccgatacgaagaccgactggatttaccttttgacccactacttatccctccttcttttctgatacaacgattgtaatgtggctcgtacgtttgttgatttggctcgcacgtcccatagcacgcgggcggaatctttttaacgttgggccttcgtcaacaaatgcctgagaaataaccagattgttagcgtccatctcgtagttgtgctcagcatttgcgatagcagattttaaaactttttcgatgatcggagaagcagctctcggagttaggttcaagatagatactgcttcgcctacttgcttacctcgaatcaggtccattactagacgtgctttacgaggagcaatacggactgttcttgcaacagctttagcttgcatttaaaagcctcctctcttagcgtcttgtttttttatcgtcactggcgtggcctttgtaagtacgagtcggtgcgaattcgcccaacttgtggcctaccatgtcttcagaaatgaatacaggcacgtgtttacgtccgtcatatactgcgatagtgtgaccgataaattgtgggaaaatagttgaacggcgagaccaagtttttacaacttgtttcttgtccgtttcatttaatttctcgatttttgtcatcaagtgtccatcgacaaatggtccttttttcaagctgcgagccattttggaacctcccttcgtgattgcactacggtccgaaatgaaccgtagacaaccccgttatttatttttacgacgacgtacgataaatttatcagatttgttctttttcttacgtgtcttgaatccaagagtcggtttgccccaaggagacattggtgatttacgtccgattggcgcgcgaccttcaccaccaccgtgcgggtgatcgttagggttcattacagaaccgcggactgtagggcggatgcctttccagcgagagcgtcctgctttaccaacgttgataagttcgtgctgctcgttacctacttgaccgatagaagcgcggcaagcagaaaggatcatgcgaacttcaccagagttaagacgtacaagaacgtatttgccttctttaccaagaacctgagcagatgtaccagctgaacgtacaagctgtccgcctttaccaggttttaattcaatgttatgcacaactgtaccaacagggatgttgataagcggaagtgcgttacctactttgatgtcagcttcagggccggacatgatttcagtacctacttgaattccttttggagcaagaatgtaacgtttttctccgtctacatagttgattagtgcaatgttagctgaacggtttggatcgtactcaactgtagcaacgcgtccaggtataccatctttatcgcgtttgaagtcgataacacggtattggcgtttgtgtccgccaccttggtgacgtacagtcaatttaccttggttgttacgtccgccttttttgtgaaggggcgcaagcaaggatttttccggctggtcagtcgtgatttcagcaaaatctgaagttgtcatgccacgacgtccgttagaggtcggtttatactttttaatcgccattttgaatttccctccttctttttacagataattaagcttcaaaaatttcgatttctttgctgtctgcagtaagttttacgatcgcttttctgcgacggctagtcataccagtatagcggccgacacgttttgatttccctttgtagttcatgatgttgactttgtcaactttcactccaaagatactttcaactgcatctttcacttctgttttattagctcttacatcaacttcaaaagtatatttcttttcagtcattaaatcagcagaacgttcagtaatgacggggcgcttaagaacatcacgaggatctttcattatgcaagcacctcctctactttttcaaccgcagcttttgtaatcagaagcttctcgtggttgacaacgtctaacacgttgattccgttagcttgaacaactgtaactccagggatgttgcgtgcagaaagagatactgcttcgtttgcatccgcagttacgattaaagcttttttctcaacagataatcctttaaggacagctgccatttcttttgttttaaccgtatcaagagtaagatcttcaagaacaataatgttgttgtcgttcactttagaagacaatactgatttgattgccaagcggcgaacttttttaggtaatttgtaagaatagctgcgtggtgttgggccgaatacgacaccacctccgcgccattgcggtgaacggattgaaccttgacgggcacgacctgtacctttttgacgccatggtttgcgacctccgccgcgtacttcagaacgattttttactttgtgagatccttgacgtaaggaagctctttgcataagaatagcgtcgaatactacgctctcatttggctcaattccaaatacagaagcgtttaattcgatatcaccagcagtagaaccgttttggttgtataatgctacttttggcatgatcaatttcctcctttcctaagagacttatttagatttaacagcacttttaacagtgattaaagcttttctcgcaccaggtacgttacctttaatcaaaagaagattgcgctcagcatctacttttacgacttcaaggttttggacagtgatttgatctccgcccatgcgtccaggtaatagtttacctttgaatacacggttaggatctacaggtcccattgaaccaggacgacggtggtagcgtgaaccgtgagacataggtccgcgagattgtccgtggcgcttgattgcaccttggaaacctttacctttagatactcctgttacatctacgatttctcctgcagagaaaatttcaaccttgacttcctgaccaatttcatacgcatccatatccacgccgcgtaattctttaacgaagcgcttaggagcagtttccgcttttgcaacgtgtcctttttccggtttgtttgaaagcttttcgcgcttatcgtcaaaaccaagctggatcgcttcatagccatcattttcagctgttttcttttgaagaacaacgtttggagctgcttcaataacagttaccgggataagatcaccgttctctgcgaatacttgcgtcataccaatttttcttcctaagattcctttggtcattcgtcacacctcctattaagatcattctatattttagaattaaagtttgatttcgatatcgacaccagatggtaagtctaatcgcatgagagcatcaacagtttgtggtgttgggttcacaatgtcgattaaacgtttatgtgtacgcatttcaaattgctcacgagaatctttgtatttgtgcaccgcacgaaggattgtgtaaactgatttttcagtcggcaacggaatcggaccagatacgctggcaccagaacgttttgccgtttcaacaatcttctctgcagattgatcaaggattctatgatcatatgcttttaaacgaatacgaattttttgttttgccattattttccctccttttcgcctacatcacgttagacagttctccgtgagaaaaacctgatcaccttgccatggcaaagcggccgggtgtgtcagcaacctctcacttcatcgcagtcaaagaccaacatacactattatacagaaaatagacgcatgttgcaaggtttatttaaagaaccttgtggttttcacactttgattattatacaggtgataccatgattaatcaaggatatgactgttttctttcagagatggaacgatgcgaaccggctgacaacttcggcaaagcgatccggttcctccaagtgaggcgaatgggctgagttctcaaaccaatgccattctttatacggcgcatcaaccttctgataatattcataagacgtcgtccccggaaccgtcaaatcgtatctccctgacataaaacagcacggtattacaatagaagaaactgattcccctgcatcaaaggaaatgagatcctcccacaggtgtttcaggctgaacatttgtccccgcgcggctaagaagctccctctcacaccgtacggttcaccaaacagcattcgcccccctgctttaagagcgccgatcggatgatgggtaaagccccctcccctcatttcaatacaaagcagaaacagcgttcgctgcagctgtttctcccatgggggtgctccgataaagctcagcgtcttgcccagcaggatatgtttgtgttgcctgctccattccatcatcaaccggtaggcttccgtttcttccttttgaatattaaccacctgactgataccgatatacgcataatacaaatcaggtttctcttgaagaacttgaagcgccaaaactgaaccccacgaatagccggcgatatatatttttctcctgctgaattgcttgcataagcgttcggtcagatgaatggtgtcagctgtcagctgatccaaagtcatagatgaacccggaatttcctttgaataagagagacccgcccctctctgatcccagttcacaacggtgaaatgcttttccagctcattctggtattttctcgcataaccgatttgaggcgtgccgggaccgccatgcaaaaacaaaagcagcggactactcctgtcatcaccattaatcataatggtttgttcactgccattaatctgcaattgctgaagcattgaaatacgattggttttcttgaagttatcgttcatcggtctgctcctaaaatttgtatacgttctattatacatggaatcagcagggaaacaaaaaaacgaggccccataagggaccccgcattattgaacgagtcgattactcagtgattgtagaaacaacgcctgaaccaactgtacgtccgccttcacgaatagagaaacgagttccttcttcgatagcgattgtagagataagttcaacgatcatttcagtgttatctccaggcataaccatttctacgccttctggaagattgatgataccagttacgtcagttgtacggaagtagaactgaggacggtagttagagaagaatggagtatgacgtccaccctcttctttagaaagaacgtaaacttcagctttgaatttgctgtgtggagtgattgtacctggtttagcaagtacttgtccacgttggatgtcttcacgagctacaccgcgaagaagtgcaccgatgttgtctccagcttcagcgtagtcaagaagcttacggaacatttcaacacctgtaacagttgttttgctgttttcttcttgaagaccgatgatttcaacttcgtcaccgactttaacttgtccgcgttctacacggccagtagcaactgtaccacgaccagtgattgagaatacgtcctcaactggcatcatgaatggtttttcagtgtcgcgttctggagttgggatgtactcatcaactgcagccataagttcaagaattttttcttcgtactcagcatcgccttcaagagctttaagagcagaacctttaacaactggtacatcatcaccagggaagtcgtattcgctaagaagatcgcgaacttccatttcaacaagctcaagaagctcttcgtcgtctaccatgtcgcatttgttaaggaatactacgatgtatggtacaccaacgtttttagaaagaaggatgtgctcacgagtttgtggcattgggccatcagcagcagatactacaaggatagctccgtccatttgcgcagcaccagtgatcatgtttttaacatagtcagcgtgtcctgggcagtcaacgtgtgcatagtgacgagtgtcagtttcgtactcaacgtgtgcagtagagattgtgataccgcgctcacgttcttctggagcaccatcaatttgatcgtacgccatagctgtacctttaccagatttcttatgaagtactgttgagatagcagcagttaatgttgttttaccatggtcaacgtgtccaattgtaccgatattggcatgtgatttggaacggtcgaatttttctttagccattctaaaatcctccttaagagcttttaattagtaatgtatagagtgatagaaagtgaaagcaagctctcacttcctcatcttacaatagtagttatacttgagttaagtggcaaaatcaattattcgcctttattttttttgataatttcttcagcgatgctcttcggcacttcttcgtagtgatccatgaacattgtgaacgtaccgcgtccttgcgtgttagaacgaagggcagtagcgtaaccgaacatttcagcaagaggtaccatcgcacgcacaacttgagcgttaccgcgagcttccataccttctacgcgtccgcgacgagaagtaacatcacccatgatgtctcccatgtattcttcaggaataacaacttcaactttcatgattggttcaagaagaactgggttacatttgctgactgcatttttcaatgccatagaagcagcgactttaaacgccatttcgtttgagtcaacatcatggtaagatccatcaaaaagtttcgccttgatgtcgattagcgggaatccggctaggacaccattttcaagagagtcttcaagacctgcttgtacggctgggatgtattcacgaggaacaacaccaccgacgattgcgttttcgaattcaaagccagcgccttcttcgttcggttcaaattcgatccaaacgtgaccgaactgaccgcgtccgcctgattgacgtacgaatttaccttcaacttttgcaccggtacggaatgtctcacggtacgcaacttgaggagcaccaacgttagcttcaactttgaactcacgcttcatacgatcaacaatgatatcaaggtgaagctcacccataccagagatgattgtttgacccgtttcagggttagtttgtgtacggaatgtaggatcttcttcagcaagtttcgctaaagcgatacccattttatcttggtcagcttttgatttaggctcaatcgctacgtcgataacaggctctgggaattccattgattcaaggattacaagatccttttcatcacacagagtatctccagtagaagtatcttttagacctacagcagctgcgatgtctccagcgtaaacagtagagatctcttcacggctgttagcgtgcatttgaaggatacgtcctacgcgctcacgcttgccttttgtagagttctttacatatgaaccggaatcaagtgtaccggaatatacgcggaagaatgtcagcttaccgacataagggtcagtcataactttaaatgcaagtgcagagaacggctcttcatcagaagaatgacgaacgatctcttcatctgtatcaggacgaacacctttgattgcagcaacatcagttggcgcaggaaggtagtcaagaacagcatcaagtacaagctgaacacctttgtttttgaaagcagaaccaacaagtacagggtagaattcaacattcagtgtacctttacggatagcagctttcagttcagggatagtgatttcttcaccttcaaggtacttttccataagctcttcatcaagctcagctacagcttcaatcaggctgctgcgaagctcttcagcttgctctttgtactcttcagggatttctttcgcatctgaacgagttccaaggtcatcttcgtagaaatacgcaacgttttctactaagtcgatgataccttcgaagttgtcttcagcgccgatcggcaattgaattgcgtgagcgttagcttgaagacggtctcttaaagtgcctacagagtaaaggaagtctgcgccgattttgtccattttgttgacaaatacaacgcgcggtactccgtaagttgttgcttggcgccatactgtttctgtctgaggctcaacacctgattgagcatcaagtacggcaaccgcaccatcaagtacacggagtgaacgttcaacttcaactgtgaagtctacgtgtcccggtgtatcgatgatgtttacacggtaacctttccactgtgcagtcgttgctgcagaagtgattgtgataccgcgctcttgttcctgctccatccagtccatttgcgaagcaccttcgtgagtttcgccaattttgtggatacggcctgtgtagaacaagatccgttctgtagtagtcgttttaccggcatcgatgtgagccatgatcccgatattacgagttttttctaaggagaactctcttgccattgggtaatttctccttccttattagggaattattattttgattatatgaatcctaccagcggtagtgagcaaatgctttgttcgcttctgccatcttgtgagtgtcttcacgtttcttaacggcagcaccagtgttgttagctgcatcaagaatttcgttagccaggcgctcttccattgttttttctccgcgaagacgcgcatagttaaccaaccagcgaagaccaagagttgtacggcgttcaggacgaacttctacaggcacttggtagttagctccacctacacggcgtgcttttacttcaagtacaggcatgatgtttttcaatgcttgttcgaaaacctccattgcatcattgccagtgcgttctttaatgatatcgaatgacttgtataggattgtttgagatttaccttttttaccgtcgatcatcattttgttgatcaggcgggataccagcttagagttgtaaagcggatcaggtaaaacatctctttttgctacaggacctttacgtggcatctgaatatcctcccttcatagttttaatgatttattattattactttgctttaggacgtttcgtaccgtatttagaacggccttgcgcacggttttcaactccggcagtatcaagcgcgccacgaacgatgtggtagcgtacccccggtaagtcttttacacgtccgccgcggatcagtacaacgctgtgctcttgcaggttgtgaccgataccaggaatgtaggcagtaacctcgattccgttagtcaaacgaacacgagcatatttacgaagtgctgagttcggttttttcggtgtcattgtaccgacacgagtacataccccgcgtttttgtggagaagatacgttagtgtgctcttttttaaagctgttgtatcctttgtttagtgcaggtgacttagagttttcaactttgctcacgcgtcccttgcgaattagctgattaattgtaggcatgttgtgttcctcccttcattacgttttataacccacatacccaggtggttcatcattaggcaaaaaaacaatgtctttacataagattgatatcttatataaaaacaaaaagtacgctataacataatggcaacagctgctgctcccacttcaattccgcaggctttgccgagctttttcatggaatccaccatacagacagcggtattttggttctttgcaagctggataacgccagccgtaagaactgaatccgcgtcttttgccacgacgacttccttcactgaacctcgttttagagctttcactgtttgcttcgtaccaataataattgatttggcctgtgatactttatcataagacataaacatatcctccaaagtaacaggttttatttcgagcaccttggttatattatcactctgcgggacggatgtcaacaacgtatgacattttttagtgcagtcccccgccagaataattgtaatactgaggaaaagctgtcgaaacagcctttcctgcagcagtttctgttattcagccggaaccatatcttccgaaggctgaacgtttgaaacaggttttacttttctgtaattcatcatacctgtaccggccggaaccagtttaccgatgatgacattctctttcaggccgagaagttcatcacgcttgcctttaatcgcagcatctgtaagaacgcgtgttgtttcctggaatgatgcggcagacaagaatgaatccgtctcaagtgaagctttcgtgataccgagaaggacaggacggcctgtagcaggtcgattgccttcaagcagcacttttttgttcgcttctgtaaattggtgaatatcaagcaatgtgccagggagaacatcagtatctccggcatcgattacacggactttgcgaagcatctggcgaaccattacttctacgtgtttatcgccgatttcaaccccctgcatacggtaaaccttctgaacctcatgcagaagatattcctgaaccgttgtcaggtcagtaactttaagaagttctttcggatcgattgaaccttccgtcagcacttgaccgcgggtaatctgatcaccctcagtcactttcaggcgtgagttgtaaggtgccgtgtatgaacgggtctcaacagcaccctgaacaacaatctcctgctgtttgtcgcggacttcattgatttcggcaattgtaccgtcaatctcagaaatcgtcgcttgacctttcggattacgcgcttcgaaaagctcctggatacgcggaagaccttgtgtgatatcgtctccggcaaccccgcctgtgtggaacgtacgcatcgttaactgtgttccaggctcaccgatagattgagcggcgataatacctactgcttcgccgacttcaacatcagttccggttgcaaggtttcgtccgtagcatcgtttacatacaccatgaggagtgttacatgtgaacgcagaacggatccacacttcttcgattccggcttcaacgatttccagcgctttatcttcatcgatcaattcattttcgttaatgagcacagcacccgtttcaggatgtttgatctgttttctggcgaaacgtccgatcagacgctcttccagacgctcgatgatttccgtgccttctttgagcggttttgcaagaataccgcggtctgttccgcaatctgtttcacgaatgataacatcctgcgcaacatcaacaagacggcgtgtaaggtaacctgagtcagctgttttcagggcggtatcggcaagacctttacgcgcaccgtgagtggagataaagtactccaatactgtcagaccttcacggaaacttgatttaatcggcaattcaatgattcgtccagccgggttggccatcagaccgcgcatacccgcaagctgtgtaaagttagatgcgttaccacgggctcctgaatcactcatcatgtagatcgggttgacttcgtctaatgatttcatcagtttgccttggataacatctttcgctgaactccaaattgaaatgactctttcataacgttcttcttcggtgattaaaccgcgtctgaactgtttcagaacattatctactttgctttgtgcttcttcaaggatttcctgtttatcatcgagaacgacgatatcagaaacccctactgtgatgccggctttcgttgaatatctgaaaccgaggtttttcatgcggtcaagcattttagacgtttccgtgatatggaatcgtttaaagatttccgcgatgattttacccaaaataccttttttaaacggtgcgttgatcggctgctcagcaatcacagcttttacgtcagcacctttatctaagaagaaacggtcaggtgtcttctcttcaatgttgctcttcgttggttcattcatgtaagggaatgattccggaagaatttcattgaagacgagcttaccgacagttgtaattaacaattttgaacgctgttcttcagtaaatgtcacattcttaagggagttcgctgcaacagctactctcgtatgaagatgaacataaccgttttgataagcaagaagcgcttcgtccgtatttttgaaaaccataccctcgccgactgctccggcgcgctcaagcgtcaggtagtagtttcctaataccatatcctgagacggcgtaacaaccggtttaccatctttagggttcaagatgttttgggccgcaagcatcagaatgcgcgcctcagcttgagcctcagctgataaaggtacgtgaaccgccatttggtcaccgtcaaagtcagcgttataagctgtacatactaacgggtgaagacggatggcgcgtccttcaacaagcgtcggttcgaaagcctggatacctaatctgtgaagagtaggggcacggttcagtaagaccggatgctccttaatgacagattcaagtacatcccatacttcaggctgcacgcgttcgattttgcgttttgcgctcttgatattgtgagcaaggcctttttcaacaagctctttcatgacgaaaggcttgaagagctcaagcgccatttccttcggcaaaccgcactgatacattttcagatgcggacctacgacgataacggaacggcctgagtagtctacacgtttaccgagaaggttctgacggaaacgcccttgtttccctttcagcatgtgagaaagagatttaagcggacggttacccggtccggtaaccggacggccgcggcgtccgttgtcaatcagagcgtcgactgcttcctgaagcatacgtttttcgttctgaacgatgatgcttggcgcgccgaggtctaacagacgttttaaacggttattacggttgatgacacgacggtaaaggtcgttcaggtcagacgttgcgaaacgtccgccgtcaagctgaaccatcggtcttaattcaggcggaataaccggaagcacgtcgagaatcatccaagacggcttgtttcctgaattacggaaggcttcaagcacttcaaggcgtttgatcgcgcgtgtacggcgctgtccttgagaagtcttcagctcttcttttaacatatcaacttctttgacaaggtcgatgtcctgcagaagtttattaatggcttccgcacccatagaggcttggaatttgtttccgtacttatccagatacgcacggtattccttttcagataaaagctgtttcttttcgagcggtgtattggccgggtcagttacgacgtaagaagcaaagtaaataacttcttccagcgcacgcggtgacatatccaatacaagacccatacggctcggaatacctttgaaataccaaatgtgagaaaccggggcagccagttcaatatgccccattctctcacgacggactttagcccgcgttacttcaactccgcaacggtcacaaactacgcctttataacgaacccgcttgtacttgccgcaatgacattcccagtccttagtcggtccgaaaatgcgttcgcagaacaggccgtccttttcaggtttcaacgtacgatagtttatcgtttcaggctttttcacttcaccaaaagaccatgaacggattttatccggtgaagcaagaccgatgttcatatactcaaaattgttcacatctagcaaggggcctacctccctttttatcttcggattaaccgatgtcacttgcctttatcaatcagagactattctttcgttactgcgtcacgttcaacgtctggagatgctgtttcttccggcgcttcatcacctgataatgcaaggccgtcagcctgtttcgcatcttcctcgtcttctagatctctcatttctatttcttcttcatcgcctgagaggatttttacgtccatacctaagctttgaagctctttgatcaatactttgaatgattccggaacaccaggctctggaacattgtcgcctttgacgatggcttcatatgttttcacacgtccgaccacgtcatcggacttcacagtcaggatttcttgaagcgtgtaagctgcgccgtaagcttcaagcgcccaaacctccatctcaccgaaacgctgtccgccgaattgggctttaccgccgagaggctgctgcgtaacaagtgagtaaggacctgtagaacgggcatgaagtttatcgtcaaccatgtgagccagtttgatcatgtacatgattccgactgatacacggttgtcgaacggttctcccgtacggccgtcataaagaactgttttagcgtctcttgacatgcctgcttcttcaagtgtttcccacacatcttcttcacgcgcgccgtcaaatacaggtgacgcgatgtgaatgccgaggtagcgggcagccatacccatgtgaagttctaatacctgaccgatattcatacgtgatggtacacccagcgggttaagcatgatatcgatcggcgtgccgtcaggaaggtaaggcatatcttcttcaggaagaatcttcgagataacccctttatttccgtgacgtccggccattttatcaccttcagaaatcttacgtttctgaacgatatatacgcgtacaagctggttcactcccggaggaagttcgtcgccgtcttcacggttgaagacttttacgtcgtggataattccgccgccgccgtgaggcacacggagagaagtatcacggacttcacgcgctttttctccaaagatcgcatgaagaaggcgttcttcagccgtaagctcagttacacctttaggcgttactttacctacgagaaggtctccgtcgttgacttccgcgccgatacggataattccgcggtcatcaaggttgcgaagcgcgtcttcccctacgtttggaatatcgcgggtgatctcttccggcccaagctttgtatcacgtgcttctgattcatattcttcaatgtgaatagatgtgtatacatcatctttcacaaggcgttcactcatgatgatggcatcctcatagttgtaaccgtcccatgtcatgaagccgaccattacgttgcggccgagagcaagttcaccaagctccattgaaggtccgtcagcaaggatttctcctttgactacttcatcgccgacacttacaatcggacgctggttgtagcacgtaccttggttggagcggacaaatttcagcaagctgtacttatccaggttgccttttactttttggccgtcaatttcttcatagcggcgcacccatacgtttttcgcttccacccgttctacgataccagggtgtttacaaataacggctgcaccggagtctttaccggatacgtattccatacccgttccgacgatcggagcttccggctgcatcaaaggcacagcctgacgctgcatgttcgctcccatgagggcgcggttcgagtcatcgttttccaagaacggaatacatgctgtcgcagcagaaacaacctgtttaggagatacgtccatgtaatccacgcggttgcgggctacaacggtgttttcccctctgaaacgcgctacgatgctgtcatccaagaaagaaccgtcatcgctcagcttagcattcgcttgggctacgacatagttatcctcttcatcagcagtcaggtagtcgattctaggcgttacttttcctgtttcaggatcaacgcggcggtatggcgtctcaatgaaaccaaagcggtttactttcgcaaatgatgacaatgagttgatcaaaccgatgttcgggccctcaggcgtttcaatcggacacatacggccgtagtgagagtagtgaacgtcacgtacttccatacctgcgcgctcacgcgtcaaaccgcccggtccgagagctgacagacggcgtttgtgcgtcaattcagcaagcgggttcgtctgatccatgaattgagaaagctgtgagcttccgaagaactctttaatagacgcaataacaggtctgatgttaatcagctgctgcggcgtaattgtattcgtgtcttgaatagacattctttcacgtacgacacgttccatccggcttaaaccgatacggaattggttttgcaggagctcacctacagaacgcagacggcggtttccgagatggtcgatatcatcagtgtcgcccactccgtgcaggaggttgaagaagtagctgatagaagaaataatatcagcaggcgtaatgtttttaatcgcctcttcgatgtaagcattgccgatcacattgatcgtctgctctccttctgcatcagtaggagcatagattttaatggattgaagcatcacttcatcctcgacaacgccgccgttaggataaagttttctgaagccgattccattttctaagtatggcaatactttatcaagtgttcttctgtcaagaatctgccctttttcagcgagaatttcaccggtttccggatccaccagtgtttctgcaaggcgctggttaaacaggcggttcttgatatgaagctttttattaattttatagcgtcctacattcgcaaggtcgtatcgcttcggatcgaagaaacgggaatccagcaagctttttgcgttttctactgtaggcggctctccgggacgaaggcgctcatagatttcaagaagcgctttgtcactgttttcggtgttgtccttatccagtgtattgcggagatattcgttctcaccaatgagatcgagaatctcttggtcggaaccgaagccgagagcacgcaaaagaaccgtaaccggcaacttacgtgtgcgatcaatgcggacatacacaacatctttcgcatcagtttcgtattctaaccatgcgccacggtttggaatgacagtcgcggtaaaaccttttttaccgtttttgtctactttaccactgaaatatacacttggagaccgaacaagctgagatacgataacacgttctgcaccgttgatgataaaagtaccggtatctgtcataatagggaaatcacccatgaagacatcctggtcttttacctctccagtttctttgttaattaaacgaaccttcactcttagcggagctgagtaagtcacatcacgttcttttgactcttcaacgggatacttaggatctcctaaactgtagtcaatgaactctagagagaggttaccagtgaaatcctcaattggtgatatgtcttgaaacatctctctaagaccctcatcaagaaaccactgataagaagaggtttgaatttcaatgagatttggtaattctaacacttcgctaatgcgagcatagcttctgcgctggcggtgtcgtccatactgaactagttgacctgtcaactgattcacccctcaaatcatgcgtattatatgtgtaataagcatctcttacgataaagaaatacttttacaagacaaaagaaaaaagggtttctaattaagaaaaccacatccaaaaacaaataccgattttattagcatttccatgtttgtataatttatacatgcactatgattatttgagcatatcatgcaaaatatatacattggcattttacaatattaacatagctgaaaattcaagtcaaactttttttgcttttatgatataatagcctttctttttttgaaccacagaaacttcgtcaaaaagctccttcagtttttcaatggcagaaggcccgccctgttttttctgtataacgatccacaattcacctgaagcccttaaatgctcagcgcttttttcaaaaatggcatggacaactttttttccggcgcggattggggggtttgtaataatagaagcaaatgtttgagcagaatcaatatttgaaaataaatcactctgataaatccgaacgttttttattccgtttttttctgcattttcatttgacagctctacggctctttcattcacgtcaatcatgtgcacggtccggtctgtaaatgcaccggcgagcgacagaccgatcgggccgtaaccgcagcctgcatccaggaagtcaccatcgatctccggctcttcaaacgcttcaattaagacacgcgaaccgaaatcaacttcctttttcgagaaaacgccgctgtcacttgtgaatgtataagatctgttccgcagtgtaaatgaccatgtctgtttatcgcttttaactgaaggtttttctgaataatagtgttcactcattattagaacctccttttttaattgcacttaaagaaaagcaaagaaaaagcccgcctcataaaagcgagcttcccctacaggcaagtgaagattacttaacttctacagaagcgccaacttcttcaagtttagctttaagctcttcagcttcttctttcgcaataccttctttaagtggttttggagtgttgtcaacaagttctttagcttctttcaagccaagaccagtgatttcacgaacaactttgataactttgattttctgagaacctgcaccagcaaggataaggtcgaattcgctttgctcttcagcagcgccgccagcagcagctccgccagctacagctacaggagcagcagcagttacgccaaattcttcttcgattgcttttactaggtcgttcaattcaagtacagttgcttctttaacggaagcaatgatttcttcgatatttaaagccatttgaaattcctccatttgttttattttagggtaaaatcagattaagcgccttgttcttccttttggtctgcaactgctttagctgcaagtgcaaggttgcgaactggagcttgaagtacgctaagcaacatagaaagtaagccatcgcgtgaaggaagttcagcaagagctttcacttcttcaacagaagatacttttccttcgataacgcccgctttgatttccagagcttcgtgatttttcgcgaactcgttaagaacttttgccggagcgacaacatcttcagtactgaatgcgatcgcattcggtccagttaagacatcattcaaaccatcaagttcagcttgttcaaccgcacggcgagtcattgtgtttttgtacactttgaactctacgttagcttcgcgaagctgtttacggagttcagttacttcagaaacgttaagtccgcggtagtcaacgatgatcgttgatttgctttctttcagtttagaagcaatctcttcaacaacaactttttttgtatcaattgcgctgctcatggttacacctcctgtagattttgtgtaacacttataccgctaggtgatcacgactgtgacgacgatttcatataaaaagcctccatgtggacatggaggctgtatatacaagcatacgtaacgtaatagctgtgatatatatacacctcggcaggatattaagcctcaacggcccctgctgtctacggtataaatgacatattatattttacaacattttgaatcatatcagaatgctgatctaaagtcaaatattattttacgttgaaagtagaagcgtctactttgacaccagggcccatagtagaagtaacggcaacgtttttcacgtaaacacctttagccgcagccggttttgctttcaggattgtatcatacattgttgtgaagttctcaacaagtttttcatcctcgaaagaaacttttccgatcggaacatggatgttaccagctttgtcaacgcggtattctactttaccagctttgatttcgccgattgctttttctacttcgaatgtaacagttcctgttttagggtttggcataagaccttttggtccaagcacacggccgattttaccgacttcacccatcatgtcaggagtcgcaacgattacatcgaattcgaaccagccttgctggattttcgcgatgtaatcagaatcaccgacgtagtctgcaccggcagcttcagcttcttttgctttttcgcctttagcgaatacaagcacgcgctgagttttaccagttccgttaggaagtacaactgcaccgcggatttgctgatcgtttttacgagggtcaacccctaaacgaaaagcaacttcaactgtagcgtcgaatttagctgtgtttgtttttttagtaagcgccactgcttcagcgacgtcgtaagctttcgcacggtctacaagcttcgcagcttcaacgtactttttaccttttttagccattttaaaatttcctccttatgtggttatagcggaataacctcccacgaataagggttgcgaacttgtgaaaactcgcaacccgacaagaaacaaattaatcctcgataacgatacccatactgcgggcagtaccttcaaccatgcgcattgccgcttcaacgtctgctgcgtttaagtcaggcattttcgtttcagcgatttcgcgaaccttatcgcgcttaacggttgccactttattacggtttggttcaccagaaccagactcaattccagctgcttttttaagcaatactgcagcaggcggagtttttgtaataaatgtaaatgaacggtcttcgtaaaccgaaatttcaacaggaatgattaaaccagcttggtcagctgtacgagcgttaaactccttacagaatcccatgatatttacaccggcttgacctagtgcaggtccaactggcggcgctgggttagcttttccagcaggaatttgcaattttacaacttttactacttttttagccacgagacacacctccttaagtccgtgatgtggtaatagggtaaaccctcccactcaaggtttcattctttatatgaatgacgaaatatcaagctagctgccttggattagtccaagacgtacctttgctatattatcattaatatatagcaatttcaagttttttcacattacaatttgtcgatctgggtaaattccagctcaaccggcgtttcacggccgaacatgttaacgaatactttcactttgctcttatcataatcaatctcttcaattgatcctgtaaagttggcgaaaggtccgtctatgactttgactgtctcattcaattcaaaatcaatgtcggttttccgctcatccatgcccatccgctttaagatggtttccgcttcgccaggaagaagcggagtcggctttgagcctgaaccggctgatccgacgaatccggtaacgcccggcgtgttgcggaccacataccaggaatcatcagtcatgacgatttcaacaagcacataacccgggaacactttctttttgactacttttttcttgccgttcttaatatcagtctcttcctcttcagggacgacaacgcggaaaattttatcctgcattcccattgattccacacgtttttcaaggttcgcttttactttgttttcataaccggaatacgtatgaacaacataccaattcttttccattctatcaggactctgcagtccttccctccccgcatttaaaaatgaagtgtaaaacaaaaaataggctcagagcctatgaatccttttttcaacacaataaaaaacccgctgaacgggttttggcaaacgatattatgatctattatagcacgtattgctgatcattattcaactattaaacgaattaattgagaaattcctgtatcaaggagggcaaaaaagataacaaaaaagataaccgttgaaatcaccgtgatcgtatagcgcgttaactctttgcctttaggccagctaacctttttcatttctttcccaacatctttaaagaaactcatcatgcgcatgtaaaagacctccacaatttaaaaagcgaacactattttgtttctaaatgagctgtatgtgaattgcaagtgctgcagtacttcttaacttctaaccgctcagccgctgatgcagagcttttcattgtcgtataattacgatttccgcatgttttgcatgccagcgtaatcttttttctcatgtcgttacaccttttcctaaacaatcatttatcttaataaaatagcacagtcagaaaaattctgtcaatatgacacagaaacccgctacagactgatttctcttatttccaaatacttttcaagcttgcgcttcacgcgctgcagggcattatcgattgattttacgtgtcggtttaaatcatctgaaatttcctggtaacttcttccgtccaagtacagaacaagcacctttctctccagatcgctcagcagttctcccattttcatttcgatatcatcaaattcttcctgattaataatcatctcttcaggatttaacgttttagcgcctgaaatgacatcaagcagtgttctgtcagattcttcatcaaaaataggtttgtctaaagaaacataggaatttaaaggaatgtgtttctgacgggtagctgtctttattgcggtaataatctggcgggtaatgcataattctgcaaaagctttaaatgaagtaagcttgtcctctctaaagtctcggatagacttatataagcctatcatcccttcctgtacaatatcttctctgtcggcccctattaaaaaataagaccttgctttcgcccgtacaaaattacggtacttcgtaatcaagtaatctaacgcatcactatccccaacatgaaccttttcaatgacctgctcgtcctccaactggcaaaattgcactttgttgaactttcccttgctgttctgtagattcactgcgatccccccggcgcacgtagatagaaatattatacattaatgggcgaaaaagcgtcaacctaatccagaccgcctcggcgccacttttcaaacgttttcaaaacctcttcggacagctcgattttacccggtggtttttcagaagtgatctttgaaacccgcctttgaatccgccgttctatcgtatccacttccctcagaagctcccgggcggatttgcggagagccccttgtccgaaaatcgcccactgctccgtataatcggaggttgcgacatgaatctgtgtcgcaatattattcagcgcctgggcaagtttctcgatccgctcatccgccgtctcattctcccgtgtaaaaatcacttcgactctgtgattcgtttgttttttctctatgccttttaccagatgtgcgtcaaacaccacaatgactctgattcccgtgtaggactgatattccgccatcttctggatcagtacatctctcgcttcttcaaaactgttcgcttttaaatcctttagctgcggccaagctccaatcatgttgtatccgtctactaacaggatgtccatctgtcattattcccctaaaggattgcgcttccggtagacttcatacatgagaaggccggccgctaccgacgcattcagagacgtgacttttccggccatcggaagtttaatgagaaaatcacatttctctttcacaagccggcccattcctctgccttcgcttccgataacgagcgccaaaggcatcttgccgtccatagagcggtagtcttcccgggcggatgcatccgttccgacgacccaaatcccccgctccttcatttcatcaagtgtccgggcaaggttggtcaccttcacgacgggaatgtgttcaatcgcaccggtcgaagcttttgcgaccgtcgatgtcagtccgaccgctctgcgtttcggaatcacaatgccgtgtgcaccgacagcgtcagccgttctcatgatggaaccgagattatgagggtcttccagctcgtccaatatgagaaagaaaggctgttcgtttctctcttccgctcttttatataattcgtctaattgtgcatattcatatgccgccacctgggcgacaacaccctgatgctgcccctccaccatctgatcgagttttttcctcggtacaaattgaatggtgacgccgcgctttttagcaagctccataacttgctgcgcctgtccttttactgtgttttccgccatccataacttatacagcttgcgatctgactttaacgtctcaatcacagcgttttttcctatgacgtaatcatgttgctgactcatttgttttcctccctgacgtcccgacttgtatagcctcagcaatcagctgattcagtctttcttctcttttctcaagaaaaaggtatccgagtaaagcctcaaaagctgtactatggcggtacgtctgtacatctgtgtttttaggcgtggtccctgatttcgcgtttctgcctcttctcagcacggcttcctcttcctccgtgaaaaaggattcgtcctgaaggcggaacaatatgtctgcctgtgattttgccgatacaatccggctcgccttcttatgaaggtcattcggtttcgtaaagccctgcttaagcaggtgatgccggacgtatatttcaaaaatggcatcacccatataagcaagcgcaagaccgtttaactgctttgaatctttgatttgttcaaattgaagcatccgcttattctccccgcttccagcgagttccctgggctgtgtcttcaagaatgatattcatgcttttcagctgatcgcgaatctggtctgacaaagcgaaatcgcgattgcggcgggcttcatttctcttctcaatcaactcttcaatctcttcgtcgacaagctcttcttcgccgagcgtaagtccgagaacagatccgattctgtcaaacatgctgataaaggctttaatgacgtgatccgccgtattgtcttcctgcatgtagtaattggcgagcttcgccagatcaaaccaaacggaaatcgcattcgccgtattaaaatcatcatccattgcttcttcaaacgaagcgcggtgctcttcgattttagcgagccattcctcatcattgtcagtcagattcgtgctgctaatcaaacgatggtttaaattactgtatgccgtcttgaggcggttaaacgcgttttttgttttctcaagcagctcttccgaatagttgatcgggtggcggtaatgaacggaaagcatgaaaaatctcaaaagctgcgggtcatattgcttaatgatatcgtgcaccaaaacaaagttgccgagcgattttgacattttctcattatcgatattgatatatccgttgtgaagccagtattttgcgaatgtcttgcctgttaatgcttcagattgcgcgatttcgttttcatggtgcgggaatgtcaggtcctgaccgccggcgtgaatatcgatttcgtcacccaaatactttttcaccattgcggagcattcaatatgccagcccgggcggccttttccccaagggctatcccatgaaatttctccgtccttagcagctttccaaagcgcaaagtccagcgcatcctctttcttctcgccgacacggatacgcgcgcctgatctgagttcatcaattgattgctgagatagcttgccgtagccttcgaaggcccttgttttgaaatagacgtcgccttctgattcataagcgtagccttttttaatcagctcgctgacaaattcaataatggcgtccatgttttccatgacccgggggtgaagatccgctttccggcatccgagggcgcccacgtcttcaaaatacgctttaatgaaccgttcagaaacggtcgggacgtcctcgccgagctcgttggccgctttaatcagtttgtcgtcaacatcggtgaaattcgatacgtattgaacatcgtatcctttatactccaaatagttgcgtacggtatcatacacaatcgccggacgagcgtttccgatatgaatatagttgtatacagtaggtccgcacacgtacatttttactttgccttcctcaagaggaacaaatgtttcctttttccgtgtcaatgtattataaagtgtaatggtcatttttggttgatcctttcttttttatcttccagttcagcctgcagttcaaaaatctgctgctccaatgctctaaaccggtcagcaaccggatcgggcaagtcttggtgattgagatcgcgtttgatttttcttccgttctgaatgacgactttccccggtatgccgacaacggtcgaaaagtcgggaacatcacgaagcacaacggagccggcccctactttagaaccctgcccgaccgtaatagagccgagcaccttcgctccggttgcaattaaagcatcatcttttatggtcggatgccgcttccccttttcttttcccgttcccccgagagtgacaccttggaataccgtcacgttattgccgatttcacatgtttcccctatgacgacccccataccgtggtcaatgaaaaaccttctcccgatggtcgcgccgggatggatttcaattccggtaaagaaacgggcaatctgtgatatcaggcgcgccaggaagaaaaatctccgtttatataaagcatgtgcaatccgatgcgcccatatagcatgtaaaccagaataagttaaaacaacttcgaaatagcttcttgctgccggatcttgatcgaacactgtatctatgtcttcttttagcattttaaaaaacacatgcttccccccattctctccccgctccagtctgtttttccgcctataaaaaaagcgcctctgcatgtaaacatgacagagacgcttttaccgcgcggttccactctgtttgaaaaacaagtcaatgttttcccaacttaaaagccggtaacggcggcggccgcctttaaatactgatttccgcagaaatgttcttcaaaggtcttaagggcgcacttctaaaacatgacgcatgaatctctctcagccgatgaagattctttctgtaatggtcattgttttatactcttccctgtcaacaatcgtatatttaaatgcttttcaggcgtctgacggctgtttctctgccgatcagctcaatggcctgcggaagctccggaccgtgtgtctgaccggtaaccgctacacgaatcggcatgaacagctttttgcctttatggcctgtttctttctgaacagctttgattgaggctttgatcagctcaggcgtaaattcttcaagctcttcaagcttcgcagcaaatacgctgagcacttcaggcacctgttcttcttccagaacggcttttgcctcttgattatactcgatctcatctttaaagaacaaatcagtaagctcgacaatttcagcgccgtagctcaattgctcatggtaaagagagattaatttacgaacccattcctgttcttcggcagaaagctcagtgccgacttttcctgctttttgcaggtgcggcagggtcagctcaaccacttgatcaagatccagcgctttgacgtattggttgttgacccatttcagtttatgcatatcaaacagagccggtgacttagacaaacgatttacatcaaaaatttcaatgaattgttctcttgtgaaaagctcttcttcaccgacgggagaccagccgagaagtccgataaagttaaacagcgcttcaggcaggtaacccagctcatcatactgctcaataaactggataattgattcatcacgtttacttaattttttgcggctttcgtttacgataagcgtcatatgtccgaagacaggaatatcccagccgaatgcctggaaaatcatgatctgtttcggtgtatttgaaatgtgatcctcaccgcggagcacgtgcgtcattttcattaagtaatcgtcaatcgcgacggcaaagttatacgtcggtgttccgtcttttttgacgatgacaaagtcgccgatgccgtctgattcaaaagaaatctcgccttttacgatatcgttaaatgcgatgattttcccttccggcacgcggaaacggatgctcggctgtctgccttcggctaaaaactgctcctgctcttcctgagtcaggtttctgtgtttgccggaatagcgcggcatttccccgcgggcgatttgctcttcacgttctttttcaagttcttcttccgtacagaaacatttataagcaagccctttttcaagaagctcttcatagtactctttgtaaatgtcgttacgctcagactggcggtacgggccgtattctccgccgacatccacactttcatcccagtccatgccgagccatttcaaatagttaagctgactttgctctccgccttcaatatttcgctttttgtccgtatcctcaatccggataataaactttccgccttggctgcgggcaaataaatagttaaaaagcgccgttctggcgttaccgatatgcaaatgtccggtcggactcggtgcataacgaacgcgtacttcatttcccatgttcaaatacttcctttcatctcgtctgtagcctctagccgaatatatgtatctattctaccaccaaatagacccggcatcaaaacaatgatcaggctttttgaatcagaacggttgcctgagcggcaattccttcggctcttccggtaaacccgagcttttcagtcgtcgtcgcttttacgtttacttgagagacgtccgcctcaaggccttccgctatccgttttctcatagcatcaatatgcggcgccattttcggcttttgcgcaataatcgtgcagtctatatttccgagtacgtaccctttttcttttacaatgttccagacatgctgaagcagcttaaaagaatcagcatccttgaattccggatcagtatccgggaaatgcttgccgatatctccttcacctgccgctccgagacacgcgtctgcgactgtatgcagcaatacatcagcatctgaatgtccgagcagtcccttttcataaggaatttcaattccgccgatgatgagcggacggccttccgttaattgatgcacatcaaatccttgtccgattctaaacattatgattcccactttccgctttcatgattgcttccgcaaatatcaggtcatccggcgttgtcagcttaatattggtatagctgccttcaacgatactcacctgatatccatcaagacgctcgacgaggctggcgtcatccgtacctaagaagcctttgttttccgcttccatatgcgccgtcttcaataaagaaagacgaaaagcttgcggcgtttgaacggcccacaagcttgaacgatcaaaggtctccgcagcccgggagccttccgcccgttttatcgtgtctttcacaggaacagccaggacagccgctcccgcctcctctgctgtttcaacgagcttatcgatatgctgatgtgtgacaaacgggcgcgctccgtcatgaacaagcacgaccgattccttatcaatcactttcagtccttcgtatacactgtgctgacgctccgcacctccggtaacaagctcaatttccgtctgaatcggaaattggaccagcagctggcgaaaatcttcccgttcactctcgtttatcaccaggattattttctgacagggtgcgtggctttcaaaaacccgcagtgtgtgtataataacgggcgcaccttttaagctgatgaacagcttatttttcccggccttcatccgttttccttgtccggcagccggaataacgacaacatactccatatgaactccctcttaaagagctttctcaagcagcttgggcttggcaaaaatcattcgtcccgccgctgtctgcagtacgctggttacgagcacatcaatatgtttccctatataattgcggccttcttccacaacaatcattgtgccgtcatctaagtaagccacaccttgattatgctctttcccgtccttaatcacctgcacattcatctcttcgcccggaagcacaaccggcttcaccgcgtttgcaaggtcattaatattcagtaccgcaaccttttgaagctcgcatactttatttaaattaaaatcattcgtcacaacgacaccggatgtcagcttcgcaagtttgacaagcttgctgtcaacctcctgaatgtcttcgaagtcgccttcataaatttcaaccgtaatatccagttccttttgaatgcgattcaagatatccagtccgcggcgtcctctgttacgttttaaaacatctgaagaatcagcgatatgctgtaattcctccagcacaaattgaggaatgacaatgacgccttctaaaaagcccgtctgacaaatatctgcaattctcccatcaataataacacttgtatccaagattttcagccttttatcctgttcttcctgctcctcatcagcacttccctttttcttctgcattcttgcagaaatggagaaaagactgatcagttcatcctttttcttaaatccgacttggaagcccagataaccgagaaagaaagccagaaagaccggaatgatggtgctgaatatacggtacggaatattgtccagcggaatcacgtttacaatgagatatgcgatgataagtccaaaaaccaatccgagactcccgaataacagatccggcaccggagctctcagcaaagaatcttcaatccattttacccaattaatcacatattctgtcgtccatatactgatgagaaaaaagataatagcaccaattgcagcagacgtatatgcgtttgttattaaaggtatgtcctgtatatttgacagcacaaacaattcaggtattaaaaagataccgacaacgccgcccacaataatgaagaacgcctgaactattcgttttaacatacctccacctccttttaagtagcattttttcagcagactgtcagagcctacaaattcagaataaacaaaaactaacaataatatacccggattccgacaggtttaagcgatacttaaagctgtctatctatatagtgtttttcctgaaggcgttttaagccttttttgattttttgggcgcgcacttcgccgataccctcgacatcatcaagctcttctacagtggcttccgttatgctgggcaaaaatccgaacgcctcaaccacattttcaacaatcggcatcggcagacgcggaattttgttcagcagcctgtagcctctcgggagcacataatcatcaagattcgtagaagccgggtatccaagcagtttaaacagaatggaatcatccagcagatcatagctggacatatcctggagctcttttaacagcacgaacggatctttgattttttctttgacatagtctttgatgaaaagtgccgcctcttcttccatgtccgtaatcagttcaatcacctgcagacggattaagtgtccttccgttccgagttctttaatatacatattgatttcattttttattcggagcaccatttcataccgatgcatgacagacagcacgtcactgaatgtcacaagctcctcaaactctaatgcgtttagagccgtaattgttttgtctaaaatggttttatacttctcgagcgtttgaatggcctgatttgcctttgttaaaataaaacctatgtcctttagtgtgtacttcatgctgtcctgatataacgtaatgacatttctgcgctcagaaatggcgatgacgagacagccggtctgcttcgccacccgttccgccgtacggtgcctcattcccgtttctgaagaagaaatggtcgcctccggcataagctgtgtattcgcataaagaattttctggccggaatcacttaaaataatggcaccgtccattttggccagctcgtataagtgagcgggcgcaaatgatgtattaatatgaaaaccgccatcgacgacttgctttaccttatcattgtatccgacaacaatcaggccgcctgtatttgcccgaagtacattctctatcccggctctgagcggggtgcccggtgcaacgaactgcagaattgcagacaggtcaagctcttgtttcgccccttttttctctttttccatctattatgatcctcctaatgaagtacgaagcgcttctgcaacatttgctactccgacaacctcaatcccttttggtattgtccacccatctgcattcgcctcaggtatgatcatgcgcttgaagccgagtttcgccgcttcttttacgcgctgttcgattcttgacaccctgcggacttctcctgtcagtcccacttcaccgataaagcaatctgcgggattcggcggtgtatctctgaagcttgaggcaatgctgacggctactgccaaatcaatcgccggttcatccagtttgaccccgccggcgacttttaaatatgcatcttgattttgaagcaaaagacccacccgcttctcaagcacagccataattaacgataccctgttgtggtcaatgcctgtagccatgcggcgcgggtttccaaaactggtcggtgatatgagcgcctggatttcaaccagaatcggtctcgttccttccattgacgcaacgatactcgaacccgatgccccggcagaacgctcttccaagaaaatttcagaagggttgagcacttccgtaagcccctcttcccgcatttcaaagatgcccatttcatttgttgagccgaaacggttttttacggcccgcaaaatacggaatgtatgatgccgctctccttcaaagtatagaacggtatcgaccatgtgctcaagcaatctcggccctgcgatcgatccttcttttgtgacgtgtccgacgataaaaataggtatgccgtttgttttcgcgattttcatcaattcggccgtacactctcttacttgtgatacactgccgggagctgaggtgatatcactttggtaaacggtctgaatggagtctacgacaacaaatgcgggtttcatctcttgtatagcagacgaaatatactccatatcggtttcagataaaacatgtaacatttggctgttgatgccaagtctgtcggcgcgcagcttcgtttgcttcacggattcttcccctgaaatgtaaagcacgctgccggccgtatctgctaattgtgcggatacttggagaaggagcgttgattttccgatcccgggatcgccgccgatcaatactaacgagcctttcacaacgccgccgccaagcactctgttgaattcttcgagctttgtttgaacgcggggttcttctgatgtttcaattgatgtaatgggtgatggtttctggacggtttgaacggagtgggagaaagccgcccgccgattcgccggcgctttttttatggtttcttccaccattgtattccaagccccgcagcccgggcactttcccatccattttgcggattcataaccgcatgagtggcagatgaattttgtttttgatttagccatatatgttgtaagacctcttccttatcgaatatttctctatataacaaagtgaggcatacactcgcttacgtatgcctcatgtttgtcactatattagttcgttttagcagttgtttttacgacaaattcgccgtcctcaacatcaagaacaatgtgttggcctttatcaatattgcctctgaggagttcttctgataaccggtcctccacatgcttttgaatcgctcttcttaacggacgtgcgccgtattccaaatcgacgccctcttctgctacttttgctttggcagcatccgtcagctcgatagagagatcttgttctttcagacgttttgttaactgatcagacataagcgacacgatgtctgtaagatgttttttctcaagggagtggaagacgataatttcgtcaatccggttgataaactcaggtctgaaggcacgcttcaactctcccatgactttgtctttcatgtctttatggttttgtgattcatcctggacattgaagcctacatatttgttgcgcttcagctcgctcgccccgacgtttgacgtcataatcaggatcgtgttgcggaaatccacagtgcgtccttttgaatcagtcaagcgtccgtcttcaagcacttgcaggagaatgttaaacacatcagggtgtgctttttcaatttcatcaagcaatacgacagagtaaggttttcttctcactttttctgtcagctggccgccttcatcatagccgacatatcccggaggagaaccgacaagacgtgaagtcgagtgtttctccatgtattcggacatatccactctgatcatcgcttcctcatcaccgaaaatggattccgccagcgctcttgccagctctgtcttcccaacgcctgtagggcctaagaagatgaatgaaccaatcggacgtttcgggtccttcagtccggctcttgcacgtctgacagcctttgccacggctacaacggcttcatcctggccgatgacgcgggaatgcagaatgctttccatattgagaagcttatctgtttccgtttgggcaattttagatacgggcaccccggtccagctggatacaaccatcgcgatatcctctacagaaacttcggagttctcctggccttgtttttctttccaggtttttttcgtgtcttccacctgttctctcaggcgctgctccgtatcacgaagggaagccgctttttcaaactcctggctctgaacggcagcgtctttttccttgcgaacttcatcgagtttctgctcaagctcttttaagttcggaggcgttgtgaaagaacggagacgcacttttgaaccggcttcatcaattaaatcgatcgctttatccggaaggaagcggtcagaaatataacggtcggacaatttaaccgcggcttcgatcgcttcatcggtaatggatacgcggtgatgcgcttcatagcggtcacggagcccttttaaaatttgaatgctttcatcggctgacggctgatccacctgaatcggctggaaacggcgctcgagagccgcgtctttttcgatatatttacggtattcatcaagcgttgtggcaccgatgcattgaagctctccgcgggccagtgaaggttttaaaatattcgatgcgtcaatcgcaccttctgctccccccgctccgatcagtgtatgcagttcgtcaatgaataaaataatattgccggcctgacgtatttcatccattacttttttcaagcggtcttcaaattctccgcggtatttcgtaccggctacaaccgtacccatgtctaacgtcattacgcgtttatcacgtaaaatttccggcacttcattattgatgatctgctgtgcgaggccttcagcaatcgcagttttacctacacccggttctccgataagaacgggattatttttcgttctgcggcttaatacctcaataacacgctgaatttctttgcttcgcccgataaccggatcaagactgtcttccttcgcaatcgcagttaaatcacgcgccagactgtcaagcgtcggcgtgtttgcattgctgttggtaccggatgcagaagaccccgtctcattgcttcccagaagctgcagcacttgctgtctcgctttatttaagctgacaccgagattattcagaactctcgccgccacgccttctccttcacggatcaatccgagaagtatgtgttctgttcccacataagaatgtcctagctttctggcttcatccatgctgagctcaatgactttttttgctcttggcgtataatgaatcgtttgagacatttcctgtccccgtccgattaagctctccacttctttctgaattttatccgaaccgagtccgagtgcttggagtgctttagccgcaatcccttctccttcacgaaccagacctaataagatatgttcagttccaatattgttatggcctaagcgcagtgcttcctcctgtgccagtgccaataccttttgagctcgctctgtaaaccttccaaacatcatatcgaatcatcctcctgtctatttgcactcatttctaaatgcagcctttccctgataagcgccgctcttctcgcgtctctttcgttcggccgtaatgcaccgcccgaatattgctggagaaaacccggctgtgtcaaaatcatcagttcattaagtatattgcttgatagccctttgatgatcccaaggtctatccccagccgaacgtcagaaaggcatttcgccgtttcctttgattcaatcatacggcagttggataaaacgccgtaagatctgaatacccggtcctccaattcaattttcgaagtttggtaaagcgcttctcgggctgaacgttcctgctcaatcagctgggcagccacactgtttaaatcatctacaatgtcctgttctgattttccgagtgtgatttgatttgaaatttgaaagatatttcctaatgcttcgctgccttcaccgtaaattcctctaacaactaagcctaattggttaattgccggtataattcgattcatttgcctagttaatacaagacccggcaaatgcatcatgactgaagcccttagtcccgtccctacatttgtaggacagcttgttaagtaccctctcttctctccaaaggcgtaatccactttctcctcaatccagtcatcaacctggtttgccgcttttatggcgttgagaagctggaagccggggaagaggcattgaattctgatatgatcttcttcatttaacataatgctgacttcttcattttcagaaagcagacagccgccaaaaggagattccgttaaattcgggctgatcagatgtttctccatcagcacccgtttttccaaaggctgagcttcactcattctgattaaatgaaattgaccgatatcaggcagttccttacctgaaaaatgatcttcgaattgctgaatgatggatgaggcttcttcattcgtataccgggcgggaaactttatattttcaaagtttcgggccaaccgtatacggctgctgagtacaatgtcactttcaggtcccttttgcttcatccaattgcttagtgcgtcctgaataaaatgcttgagcgacattacccttgttccccctcactgtctgtactttttaattcctgctctaacgatcggatctgatccctgacctccgctgctctttcaaactcttcgtggtgtattaaagattcaagttctttttttaacatttccatttgccgtcttacatgcaggtttccgcctattcgttttggaattttcccggcatgcaccgtattcccgctgtgaacttttcgcaagatcggcgtaatttggctgtagaacgtatcgtaacattccgcacagccgaaacgccctgtttttctcagctgctgaaacgtcataccgcatttcttacaagctgtgccttgctctgagtagccgaacatttgagaaccggtgttttgaaatgaggactccatattcagcagtcctgataataaattatgaattgagaacccttggtttccacttatactgtatgaatcgctattttcttttgcacattgttcacaaatatgaacttcttgcttttctccattaacaactttcgtaaagtgaaaagtggccggtctctcattgcattcttgacaaatcaatcttttcacccgcttactttagttttaaagatgtgagcattgctttcatcattctggctcttagttcatcccgttcgggcaaatcaatatatagaactgaacgatccattacactcaccatcattttagcttctctttccgaaataactccgtcctctaacagtctgagaataatgtcatcagaggctgcctgggacaagtgggtatggatctgcgaaataatattattgatgaggacgacttcgttattcattttaattttgataatacgaatataaccgccgcctccccgtttactttcaacaatatatcctctttcacttgtaaatctggtgttgatgacataatttatttgggaaggaacacattgaaatttatcagcgatttcactgcgtttgatctctaaaatttctttgccattttgatctaatacttgtttcaagtactgttcaatgatgtcagaaatattatgtcccactcaaccccctcctttattgactttgactatatttgactttaatcttactataaggtgtttcgcaaaatttttcaactgtatcgctctatctctattatttccactttacacaagcataaaacctgcttttgcaaaaagccatatcgttacttttctcatactatataacgtatgcagaaaaacacaaaaaaggcagctcatgatgagctgcctttaccgtaaatatagcttggcggcgtcctactctcacagggggaaacccccgactaccatcggcgctgaagagcttaacttccgtgttcggcatgggaacgggtgtgacctcttcgctatcgccaccaaaccattgagagtgttctctcaaaactagataacagtaagcatacattcaaattggttaagtcctcgatcgattagtatctgtcagctccatgtgtcgccacacttccacctcagacctatcaacctgatcatctttcagggatcttacttccttgcggaatgggaaatctcatcttgaggggggcttcatgcttagatgctttcagcacttatcccgtccgcacatagctacccagcgatgcccttggcagaacaactggtacaccagcggtgcgtccatcccggtcctctcgtactaaggacagctcctctcaaatttcctgcgcccgcgacggatagggaccgaactgtctcacgacgttctgaacccagctcgcgtaccgctttaatgggcgaacagcccaacccttgggaccgactacagccccaggatgcgatgagccgacatcgaggtgccaaacctccccgtcgatgtggactcttgggggagataagcctgttatccccggggtagcttttatccgttgagcgatggcccttccatgcggaaccaccggatcactaagcccgactttcgtccctgctcgacttgtaggtctcgcagtcaagctcccttgtgcctttacactctgcgaatgatttccaaccattctgagggaacctttgggcgcctccgttaccttttaggaggcgaccgccccagtcaaactgcccacctgacactgtctccccgcccgataagggcggcgggttagaaggtcaatacagccagggtagtatcccaccgatgcctccaccgaagctggcgctccggtttccaaggctcctacctatcctgtacaagctgtaccaacattcaatatcaggctgcagtaaagctccacggggtctttccgtcctgtcgcgggtaacctgcatcttcacaggtactataatttcaccgagtctctcgttgagacagtgcccagatcgttgcgcctttcgtgcgggtcggaacttacccgacaaggaatttcgctaccttaggaccgttatagttacggccgccgtttactggggcttcaattcgcaccttcgcttacgctaagcgctcctcttaaccttccagcaccgggcaggcgtcagcccctatacttcgccttacggcttcgcagagacctgtgtttttgctaaacagtcgcctgggcctattcactgcggctctctcgggcttgcaccctaacagagcaccccttctcccgaagttacggggtcattttgccgagttccttaacgagagttctctcgatcaccttaggattctctcctcgcctacctgtgtcggtttgcggtacgggcacctctcacctcgctagaggcttttcttggcagtgtggaatcaggaacttcgctactataattcgctcgccatcacagctcagccttcacgggaaacggatttgcctatttcccagcctaactgcttggacgcggatatccaataccgcgcttaccctatcctcctgcgtccccccattgctcaaatggtgaggaggtggtacaggaatatcaacctgttatccatcgcctacgcctttcggcctcggcttaggtcccgactaaccctgagcggacgagccttcctcaggaaaccttaggcattcggtggaggggattctcacccctctttcgctactcataccggcattctcacttctaagcgctccacaagtccttccggtcttgcttcacagcccttagaacgctctcctaccactgttcgaagaacagtccgcagcttcggtgatacgtttagccccggtacattttcggcgcagagtcactcgaccagtgagctattacgcactctttaaatggtggctgcttctaagccaacatcctggttgtctaagcaactccacatccttttccacttaacgtatactttgggaccttagctggcggtctgggctgtttccctttcgactacggatcttatcactcgcagtctgactcccaaggataagtcatcggcattcggagtttgactgaattcggtaacccggtaggggcccctagtccaatcagtgctctacctccgagactcttaccttgaggctagccctaaagctatttcggagagaaccagctatctccaggttcgattggcatttcacccctacccacacctcatccccgcacttttcaacgtgcgtgggttcgggcctccattcagtgttacctgaacttcaccctggacatgggtagatcacctggtttcgggtctacgaccacgtactcaattcgccctattcagactcgctttcgctgcggctccgcatcttctgcttaaccttgcacgggatcgtaactcgccggttcattctacaaaaggcacgccatcacccgttaacgggctctgactacttgtaggcacacggtttcaggatctctttcactccccttccggggtgcttttcacctttccctcacggtactggttcactatcggtcactagggagtatttagccttgggagatggtcctcccggattccgacggaatttcacgtgttccgccgtactcaggatccactcaggagagaacgaagttttgactacagggctgttacctcctatggcgggcctttccagacctcttcatctacctcgttcctttgtaactccgtacagagtgtcctacaaccccaagaggcaagcctcttggtttgggctggtcccgtttcgctcgccgctactcagggaatcgcatttgctttctcttcctccgggtacttagatgtttcagttccccgggtctgccatctcatatcctatgtattcagatatggataccactccattacgagtggtgggtttccccattcggaaatctccggatcaaagcttgcttacagctccccgaagcatatcggtgttcgtcccgtccttcatcggctcctagtgccaaggcatccaccgtgcgccctttctaacttaaccgttaaaaagaatcactacgtgatatcttgcattacaattgaatgtgaattacttctgttatctagttttcaaagaacaacatctcgaagaatcgaatgatccttcaaaactaaacaagacagggaacgtactgtttataagacccgaggtctaatattccgttaaaatccttagaaaggaggtgatccagccgcaccttccgatacggctaccttgttacgacttcaccccaatcatctgtcccaccttcggcggctggctccataaaggttacctcaccgacttcgggtgttacaaactctcgtggtgtgacgggcggtgtgtacaaggcccgggaacgtattcaccgcggcatgctgatccgcgattactagcgattccagcttcacgcagtcgagttgcagactgcgatccgaactgagaacagatttgtgggattggcttaacctcgcggtttcgctgccctttgttctgtccattgtagcacgtgtgtagcccaggtcataaggggcatgatgatttgacgtcatccccaccttcctccggtttgtcaccggcagtcaccttagagtgcccaactgaatgctggcaactaagatcaagggttgcgctcgttgcgggacttaacccaacatctcacgacacgagctgacgacaaccatgcaccacctgtcactctgcccccgaaggggacgtcctatctctaggattgtcagaggatgtcaagacctggtaaggttcttcgcgttgcttcgaattaaaccacatgctccaccgcttgtgcgggcccccgtcaattcctttgagtttcagtcttgcgaccgtactccccaggcggagtgcttaatgcgttagctgcagcactaaggggcggaaaccccctaacacttagcactcatcgtttacggcgtggactaccagggtatctaatcctgttcgctccccacgctttcgctcctcagcgtcagttacagaccagagagtcgccttcgccactggtgttcctccacatctctacgcatttcaccgctacacgtggaattccactctcctcttctgcactcaagttccccagtttccaatgaccctccccggttgagccgggggctttcacatcagacttaagaaaccgcctgcgagccctttacgcccaataattccggacaacgcttgccacctacgtattaccgcggctgctggcacgtagttagccgtggctttctggttaggtaccgtcaaggtgccgccctatttgaacggcacttgttcttccctaacaacagagctttacgatccgaaaaccttcatcactcacgcggcgttgctccgtcagactttcgtccattgcggaagattccctactgctgcctcccgtaggagtctgggccgtgtctcagtcccagtgtggccgatcaccctctcaggtcggctacgcatcgtcgccttggtgagccgttacctcaccaactagctaatgcgccgcgggtccatctgtaagtggtagccgaagccaccttttatgtctgaaccatgcggttcagacaaccatccggtattagccccggtttcccggagttatcccagtcttacaggcaggttacccacgtgttactcacccgtccgccgctaacatcagggagcaagctcccatctgtccgctcgacttgcatgtattaggcacgccgccagcgttcgtcctgagccaggatcaaactctccgataaagtagtttgactgactacgcacatcgctgtgcgatttatttaaaactttgaattaacaggtacgttttgtcttgtttagttttcaaagatcattttgttcactttctcaagcaactttttaagtatataataagtttctcttaaagtcaacatgtttttttataaatggtggagcctagcgggatcgaaccgctgacctcctgcgtgcaaagcaggcgctctcccagctgagctaaggccccgaagtggtcgggaagacaggattcgaacctgcgaccccatggtcccaaaccatgtgctctaccaagctgagctacttcccgatttttaaaaatattatggcgcgcccgagaggagtcgaacccctaaccttttgatccgtagtcaaacgctctatccaattgagctacgggcgcataataatgaatgccgagggccggacttgaaccggcacggtagtcacctaccgcaggattttaagtcctgtgtgtctgccaattccaccaccccggcgtggatggtatagttggagcggaagacgggattcgaacccgcgacccccaccttggcaaggtggtgttctaccactgaactacttccgcatacaggataactatcctgtataatgcgggtgaagggacttgaacccccacgtcataagacactagatcctaagtctagcgcgtctgccaattccgccacacccgcgttacatggtgagccatgaaggactcgaaccttcgaccctctgattaaaagtcagatgctctaccaactgagctaatggctctttttaaaagacttgtgttattatcttgtccaaaaatggtgccggccagaggacttgaacccccaacctactgattacaagtcagttgctctaccaattgagctaggccggcaaatatggtggaggatgacgggctcgaaccgccgaccctctgcttgtaaggcagatgctctcccagctgagctaatcctccatatattacacttacgtgtaatggcttggcggcgtcctactctcacagggggaaacccccgactaccatcggcgctgaagagcttaacttccgtgttcggcatgggaacgggtgtgacctcttcgctatcgccaccaaaccattgagagtgttctctcaaaactagataacagtaagcatacattcaaattggttaagtcctcgatcgattagtatctgtcagctccatgtgtcgccacacttccacctcagacctatcaacctgatcatctttcagggatcttacttccttgcggaatgggaaatctcatcttgaggggggcttcatgcttagatgctttcagcacttatcccgtccgcacatagctacccagcgatgcccttggcagaacaactggtacaccagcggtgcgtccatcccggtcctctcgtactaaggacagctcctctcaaatttcctgcgcccgcgacggatagggaccgaactgtctcacgacgttctgaacccagctcgcgtaccgctttaatgggcgaacagcccaacccttgggaccgactacagccccaggatgcgatgagccgacatcgaggtgccaaacctccccgtcgatgtggactcttgggggagataagcctgttatccccggggtagcttttatccgttgagcgatggcccttccatgcggaaccaccggatcactaagcccgactttcgtccctgctcgacttgtaggtctcgcagtcaagctcccttgtgcctttacactctgcgaatgatttccaaccattctgagggaacctttgggcgcctccgttaccttttaggaggcgaccgccccagtcaaactgcccacctgacactgtctccccgcccgataagggcggcgggttagaaggtcaatacagccagggtagtatcccaccgatgcctccaccgaagctggcgctccggtttccaaggctcctacctatcctgtacaagctgtaccaacattcaatatcaggctgcagtaaagctccacggggtctttccgtcctgtcgcgggtaacctgcatcttcacaggtactataatttcaccgagtctctcgttgagacagtgcccagatcgttgcgcctttcgtgcgggtcggaacttacccgacaaggaatttcgctaccttaggaccgttatagttacggccgccgtttactggggcttcaattcgcaccttcgcttacgctaagcgctcctcttaaccttccagcaccgggcaggcgtcagcccctatacttcgccttacggcttcgcagagacctgtgtttttgctaaacagtcgcctgggcctattcactgcggctctctcgggcttgcaccctaacagagcaccccttctcccgaagttacggggtcattttgccgagttccttaacgagagttctctcgatcaccttaggattctctcctcgcctacctgtgtcggtttgcggtacgggcacctctcacctcgctagaggcttttcttggcagtgtggaatcaggaacttcgctactataattcgctcgccatcacagctcagccttcacgggaaacggatttgcctatttcccagcctaactgcttggacgcggatatccaataccgcgcttaccctatcctcctgcgtccccccattgctcaaatggtgaggaggtggtacaggaatatcaacctgttatccatcgcctacgcctttcggcctcggcttaggtcccgactaaccctgagcggacgagccttcctcaggaaaccttaggcattcggtggaggggattctcacccctctttcgctactcataccggcattctcacttctaagcgctccacaagtccttccggtcttgcttcacagcccttagaacgctctcctaccactgttcgaagaacagtccgcagcttcggtgatacgtttagccccggtacattttcggcgcagagtcactcgaccagtgagctattacgcactctttaaatggtggctgcttctaagccaacatcctggttgtctaagcaactccacatccttttccacttaacgtatactttgggaccttagctggcggtctgggctgtttccctttcgactacggatcttatcactcgcagtctgactcccaaggataagtcatcggcattcggagtttgactgaattcggtaacccggtaggggcccctagtccaatcagtgctctacctccgagactcttaccttgaggctagccctaaagctatttcggagagaaccagctatctccaggttcgattggcatttcacccctacccacacctcatccccgcacttttcaacgtgcgtgggttcgggcctccattcagtgttacctgaacttcaccctggacatgggtagatcacctggtttcgggtctacggccacgtactcaattcgccctattcagactcgctttcgctgcggctccgcatcttctgcttaaccttgcacgggatcgtaactcgccggttcattctacaaaaggcacgccatcacccgttaacgggctctgactacttgtaggcacacggtttcaggatctctttcactccccttccggggtgcttttcacctttccctcacggtactggttcactatcggtcactagggagtatttagccttgggagatggtcctcccggattccgacggaatttcacgtgttccgccgtactcaggatccactcaggagagaacgaagttttgactacagggctgttacctcctatggcgggcctttccagacctcttcatctacctcgttcctttgtaactccgtacagagtgtcctacaaccccaagaggcaagcctcttggtttgggctggtcccgtttcgctcgccgctactcaggaaatcgcatttgctttctcttcctccgggtacttagatgtttcagttccccgggtctgccttctcatatcctatgtattcagatatggataccactccattacgagtggtgggtttccccattcggaaatctccggatcaaagcttgcttacagctccccgaagcatatcggtgttcgtcccgtccttcatcggctcctagtgccaaggcatccaccgtgcgccctttctaacttaaccgttaaaaagaatcactacgtgatatcttgcattactaattgaatgtgaattacttctgttatctagttttcaaagaacaatatctcgaagaatcgaatgatccttcaaaactaaacaagacagggaacgttctgtttataagacccaaggtcttatattccgttaaaatccttagaaaggaggtgatccagccgcaccttccgatacggctaccttgttacgacttcaccccaatcatctgtcccaccttcggcggctggctcctaaaaggttacctcaccgacttcgggtgttacaaactctcgtggtgtgacgggcggtgtgtacaaggcccgggaacgtattcaccgcggcatgctgatccgcgattactagcgattccagcttcacgcagtcgagttgcagactgcgatccgaactgagaacagatttgtgggattggcttaacctcgcggtttcgctgccctttgttctgtccattgtagcacgtgtgtagcccaggtcataaggggcatgatgatttgacgtcatccccaccttcctccggtttgtcaccggcagtcaccttagagtgcccaactgaatgctggcaactaagatcaagggttgcgctcgttgcgggacttaacccaacatctcacgacacgagctgacgacaaccatgcaccacctgtcactctgcccccgaaggggacgtcctatctctaggattgtcagaggatgtcaagacctggtaaggttcttcgcgttgcttcgaattaaaccacatgctccaccgcttgtgcgggcccccgtcaattcctttgagtttcagtcttgcgaccgtactccccaggcggagtgcttaatgcgttagctgcagcactaaggggcggaaaccccctaacacttagcactcatcgtttacggcgtggactaccagggtatctaatcctgttcgctccccacgctttcgctcctcagcgtcagttacagaccagagagtcgccttcgccactggtgttcctccacatctctacgcatttcaccgctacacgtggaattccactctcctcttctgcactcaagttccccagtttccaatgaccctccccggttgagccgggggctttcacatcagacttaagaaaccgcctgcgagccctttacgcccaataattccggacaacgcttgccacctacgtattaccgcggctgctggcacgtagttagccgtggctttctggttaggtaccgtcaaggtgccgccctatttgaacggcacttgttcttccctaacaacagagctttacgatccgaaaaccttcatcactcacgcggcgttgctccgtcagactttcgtccattgcggaagattccctactgctgcctcccgtaggagtctgggccgtgtctcagtcccagtgtggccgatcaccctctcaggtcggctacgcatcgtcgccttggtgagccgtcacctcaccaactagctaatgcgccgcgggtccatctgtaagtggtagccgaagccaccttttatgtctgaaccatgcggttcagacaaccatccggtattagccccggtttcccggagttatcccagtcttacaggcaggttacccacgtgttactcacccgtccgccgctaacatcagggagcaagctcccatctgtccgctcgacttgcatgtattaggcacgccgccagcgttcgtcctgagccaggatcaaactctccgataaagtagtttgactgactacgcacatcgctgtgcgatttatttaaaactttgaattaacaggtacgttttgtcttgtttagttttcaaagatcattttgtctttcgttcaagcgactttattattatatcttatcaatctcttgaagtcaacaactttttaaatttctttttttcgtcagcgccttgtttagcggcaacgaataataatataccacctcacaaataatagtgcaatagtttttttaaagaaaatcaaaaagttttacgagcggcttgtttctaaaaaagcgccgtactgcgataagcagaaaacggcgccttcccttttattagcgttgtctcatttgagggaataataaaacgtctctgatagacggagcatttgttaacagcatgacaaggcggtcgataccgatacccaatcccccggtcggcggcatgccgtattcaagagcttcaacgaagtcttcatccatcatatgcgcttcatcgtttccttcttctctttcttttaattgcgcttcaaagcgttccctctggtcaatagggtcattcagctccgtaaacgcattagcgtgctcacggccgacgataaacagctcaaaacggtctgtaaagcgagggtcctccggatttttcttagcaagaggagaaatctctacagggtggccgtaaataaatgtaggctgaatgagtgtttcttcaattttttgttcgaagaattcattgatgatatgacccaccgtcatagagtttgtgatctcgataccatgctcttttgcatgaccgcgcgcttcttcaacagtcatctcattccagaaatctacgcctgtcgcttctttgaccgcatctaccatgtggagtcgtttccactcaggtttcagatcaatctgctcttcgccgtactggattgtggtgcttccaagcacttcctgcgcaatatgtgctacgaggttttccgtaagactcataatatctttataatcggcgtacgcttcatacagctcgatcatcgtgaattcagggttatggcgtgtagaaacaccttcgttacggaacacgcggccgatttcgtagactttttccaatccgccgacaatcaggcgtttcaggtgcagttcaatcgcaatacgcatataaagaggcatgtcgagcgcgttatggtgcgtgatgaacgggcgtgcagacgctcctcccggtatgctgtgcatcgtaggtgtttcaacttctaagtatccatggtcatctaagtatcttctcatcgcttggatgattttgctgcgtgtgataaacgtttgtttgctgtcagggtttacgatgagatcgagatagcgctggcggtaacgctgttcaacgtcttttaacccatgatatttatcaggaagaggacgcagtgcttttgtcagcagttcaaaagatgtcgctttgacagaaagctcgcctacgtttgttttgaaaactttcccggtgatgccgataacgtctccgaggtctgaagatttaaagatttcatattgttcttcgccgacactgtcttttcttacgtaaatttgaatttgaccttctaagtcctgcagatgcgcaaagccggctttcccttttccgcgctttgtcatcatacggcctgcaatggtcacttcgatcgctttttcttccagttcttctttagaaagctcctggtaggcgtcaatgatttgttgagattgatgcgttctctcgaaacgttcgccgaaagggtcaatgccgttttctctcagctggttcattttatctcgtctgacttgcagctggtcgttcaattcctcatgattttgctcttcttgactcattggtatcactccgttacattttgatttcacgaaaaagcagaaaaactgccagcggtaagctggcagtgagcagcaatagagggtgtatattaacctacttttgcatcttgaagctcttttgcctctgcttcggcggtaaatgcatctaaaagctgcacaaatttttcacgcgtctcacattggttaatttcattgcgtacattcgcattgcctctgacacctttcagataccaggcagcgtgttttctcatttctctgactgccacattttcgccttttaacttaatcaggcggtctaagtgcagtttgcataccgacattttttcacggactttcggctcgtcttttaactcaccggtttcaaggtactgcaccgtacggtaaatcatccacgggttgccgagtgcggcccggccgatcatgacgccgtcaactcctgtttcctcaagcatgcgtttcgcgtcctgaggcgttttgacatcaccgtttccgatgacgggaatggagacggattgcttcacttctttaatgatatcccagttcgcagtgccttcatacatttgcactcttgtgcggccgtgaagggcaacggcttttccgccggcacgttcaacggcttgggcgtttttcaccgcataaatgtgatcttcatcccaacccattctcatcttcactgtaaccggcttatcaacagcatctactactgcggataccatttcataaatcttatcaggatcgagaagccatttggcgcccgcatcacattttgtaatctttggtacgggacatcccatgttaatatcaataatatcagcagtcgtgttttgatctacaaacttcgccgcttccacaagggtttccttttttcctccaaaaatctgaaggctgagcggtttttcacgttcatcaatgtaaagcatccccattgttcttgcgttgttgtaaaggatcgctttgtcactgaccatttcagcgcataccaatccggctccgaattcctttacagtcaatctgaacgctgagttgcagacaccggccataggggcaagcacaacccggtttttcaattgaatatcaccgattttaaacatttttcccctcctttcatttgtctatttttcaggcggggccaattcgtccgcacttatatttaaaacatctgccgcatcttgaatgatggcatctgacggcaatcggtttccgcgttcaatttcaccgacaatagaaactgatatacctaatgcttttgcaaatccttcttgagtataacctttcagctttctgaatgcacgaattcgcctaccccagatttctgcttccatactcttacaccttcttggtttgtttcagcgcttatcgtgatatgatccgcctgcggacatatttcttttaacggcgcaaggacaaataagcgctcatacattctcggatgcggaacaatcagccgctctgtttcaatattttcacgattatacagcaaaatgtcaaggtctgccgtccgcggtccccagcgaatctctctcgttctgcctaattcagcttcaatggactgtgttacatctagaagttcaaaaggagataacgacgttttcacttcaaccgccatattgagaaactgatcctgatcctcataaccgacgggatctgtttcatatatagaggatatctttgacaccgtcacgccatcatgccgggtgagcatggccactgcctggcgcaaataatgttcacggtcgcccatattggaaccgaggccgatatatgccgtattgttcatgatttctttctcgtcatttctatggctactgatttataatggccgggaatcggcgggtcaggcttaacaacctttaccgtacattgctgcaccggctcaaatttctcaaggacggtgtctgcgatccgttccgcaagggtctcgaccaaattaacgggctcgccctcaacgatgccgcggcagacactgtacaattccgcatagttaatggtataagaaaggtcatccgtttttcccgctttgctcaaatccagttcggcagtcaggtctactttgaagcgctggccgagtttgttttcttcctcgaacacgccgtgatatccgtaaaactccataccttccacatatactttatccataatgcgcgcctcctttgttcagcatagcatccatcatcttagtcattcttgcgatctctttaacatcgtgcaccctcacaatgtcgcagcctttttggacgccaaggcatactgtcgctcccgttccctcggcacgttcttcagggggaaggtcaagcacacggccgatgaacctttttctcgatgtcgccaggagcagcggataccctaacccgctgaacacctccagcttgttcatgacagccagattgtcctcatagtttttcgcaaagccgatccccggatccagaatcatgttttcatctgtgacgccggcttctgcggcaatttttacgctttccatcaagtctgcaagcatatcaggaataagatcgttatagtttctttccatacgattatgcattaagataatcggaactccgtgtgcggcggctactgacgccatgtcagggtcacctttcgccccccagatgtcattaaggatagaggctcccgctttgaccgcttcgtctgccacggacgctttgtacgtatcgattgaaagcggaatgtccagctcgcttgtaatccgttctatgacggggatgactcgtgacatttcctcatcagccgaaacgagtgatgcgccgggccttgtcgattcgccgccgatatctatgatatgcgccccttcttcagccatcttcgccgcatgcagaagcgccctttccgtactgtcgtatttgccgccgtcagagaaggagtctggcgttacatttaatatccccataacgagcgtcttctctttataggacagagcgcctttttttgtatgaatcagtttaggctgttcaattgtttgctgcgccattttgttcctcctcctgtacattcattttgtttatttcctgccgatactgcttacggagcaattgcaccgttttcccgctcattccgggcagcggcacttcctctattttagaaaacgggatgatttcaagcacggagtttgtcaaccatgcttcatccgcttcaagcattgattgaaaacggaatcggccttcggtgacttctgtcccctgccgtttcaattcatcaatgacaaactgtcttgttacaccgtcgagaattcccgtatccaaagatggcgtaaagaccttgtctccttttcgccaaaacacgttggagacaatgccttccgcgacatctccttctccggtcaggaaaatcccttcaagattgggatcattcccgatctcccgtttagcgtacatgttgtttaaatagtgatgggattttaaccggaaagatccttcaggcgtatttctccggacagagagaagcctgccttctttttgaacaggcagagtttccggattgagccggttcacgaaacaaaggacggtcggcttttcataagtctgcgcggcaaatcccttatcgctgacgcctgccgagatgttaagccggacacgcgcgctgccgtcctttatgtcattgagaagcaacagtctccgaagcatatcaagcagctcctgtttgttcacctcgaatgcaatctgcagatcccgaagcgccctgttgagcctggcgacatgcgcatccggcagaaacggccggccgctgtaaagcctgaacgtctcgaacgctccgatcccgtacagataaccatggtcaaaaggagaaagcgccgcttctttctcctctatatattgaccattcaaatatataatcacaccgatacttcctttttgcggtgtgtctctataaagtttctgagcatctctttgccgaaggaggtcatgatggattccggatggaactgaacaccttcaacaggcagctcattatggcggatggccataatttctccttctttggtttgagcggataccgtaaaacaatccggcagcgtgtccgctttgacaataagtgaatggtaccgggtggcgaccagcggattttgcaggccgttaaaaatcgtctgtccgtcatgcataacttctgacgttttgccgtgcatgagccgctctgctctgacgacatcgccgccgaatacttgcgcaatcgactgatgcccgagacatacgccgaaaataggaatactgccggcaaaatgtttgatggcttcgaggctgatccccgcttcatcaggactgcacggcccgggagaaatcattaagaagtccggacccagctcttcaatctgctcaatcgtaatctcgtcattccgtctgacgatcagttcctccccgagctcacccaaatattgaaccaagttgtacgtaaatgaatcataattgtcaatcattaaaatcatctctgctcacctcgtctgattttttgtctcttcttcgctcagctctaacgcctttttcatcgcaaaagcttttttgaacgattccttgtattcatgcttcggaaccgaatcaataaccactcctgctccggactgcataaaagcatgtccgccggctgcatagatcgtccggatcacaatgttaaactgcaaatctccgttgaatccgaaccagcctatagatccagtataaagcccccgtcttgtcggctcaagctcttctataatttccatcgttctcactttgggcgctcccgtgatggtgccccccgggaacaccgcatgaataatgtctgtcgcgtcatatccgtcctgcagctctccctgtacgtttgacacgatatgcatgacgtgggaatatttttcgatcgccataaactcgttaacccgcacggagccgtagcgcgatacgcgcccgaggtcattacgctcaagatcaacaagcatgacgtgttccgcacgttctttttcgttgtgaattaattcatcagccaaagccttgtcttcagcatcgtcttttcctcttgaacgcgtacccgcgatcggtctcgtttcaagcttcttccccttctttgtcaccaatagctccggcgacccgcatatcacttgaaaccccggtgtctcgagataggccatgtaaggagacggattgacgtttcgcaagtgtttatacacctcatacggatgaacggataaagactgagactgcctgatggacaaattaacctggaacacatccccgctcgcgatatattgtttaatttgttctacagcctgtgaaaatccttcctcggtgaacggagcggcgtacgatccgtccccattccgattcagcggtgaaaaaggctcgtccgccgtttggagggaacaccacatgtcctctaagccggacagcttttcttccgcaagatccgcttcttccgcttcagtatgggtaatgagccataacgcctcttcctcatggtcataaacggccacatcatcaaaaacaagaaagtaaatatcaggtgtttccagatcatctaacgacagcatcttaaaattctcaatatatcgggcatagtcgtaactgataaaaccaatcgcaccgccctgaaagtccggaaactcaacgtttgtttccgttccgagcgttccaaaccattcatgaaaggcccgcagcgggtcaccttctttaaacagtgtttctccctcatgcttgatcgttgtaattccgtctttccctctgacggacgcaatcggatctagaccggctatactgaatcttccccctctcgcgctttcgagcagaacatgccgttttctcgatttcgaaaggttttcatatcgctgtaaaaatgcttgtttcgtaaaaggtatttttcttcctgccggtctgcgttgtgccatcatatcaatcctctgcttcgttttactgtagttttattttaaagcaatcacactggtgaaaaaagtgaatttcacttccaaccataaaattcgaaacgttttttggattttcgatacttcaggcacaaaaaaactcccggatacagccgggagccgtgtgtatgtctctattcaaactgataaagcggtgtgcttaagtaacgttctccgttactagggatgatcgcaagcactttcttgcctttcccgagttttttcgcgatttccagtgccgcgtaaatggccgctccggaagaaataccgccgagaatcccttcttcttttgccgttttacgggcatattcaaatgcatcctcgtttttgacgggaatgatttgatcatagatgtccgtattcaatgtttcagggacaaatcccgctccgataccctgaattttatgcggacccggttttccgccggaaagaactggagaatccgccggctctaccgcatagattttgatggatggatatgcttttttcagcacttcgcccgctcccgtgatggttccgccggtaccgattccggccacgaacgcatcaagctggtcgtcaccaaactgttctacgatttctttccccgtcgtttggcggtgaatttccgggtttgccgcattgttgaattgctgaggcacaaagtatccgtgttcctccgcaagttcttccgcctttttaatggcgcccttcattccttctgcgccgggagtcagcacaagctccgctccgtatgcgcgcagcagattgcgtcgttccatactcattgtatcaggcataacgagaatggctctgagacctttagccgctgccaccatcgcaagaccgattcctgtatttccgcttgtcggttcaatgattgtgtcgccggcttttaattttccttctttttcagccgcttcaatcatcgccgctccgatacggtcttttacgctgctgcccggattcatgtattcaagcttcagatatacatctgcactgttttcatccgtcaggcgattcaatttcacaataggagtatttccgattagttcagtaatagaatttgcaatacgcaccatgttggacacctcaatttccgactaaatttattggtattataaatataagttatcaatttcaaaattttttgtcaatcatttagttcttttttccccgtagaaccaagagacccccgcctctttccacagcgttttgactgtcgccttgtcacctaattgatccatcgcgatctggcgtctgatttgactcttcacttcattgtatgagaaagttctcgctttaagcttttctttcagctgaatgacggcatatcctgaagaaactttaatcggttcagcggaccattcatcttctttgagatttttagcttctgtgatatatgcctgcgggatattttcctggttttctgtcacaaagccgaggtctccgccatactgagacgtgtatctgtccgtggaacgctcagcggcgacggcttcaaagctggaaccgcctttcaaatcagcaagcaccctgtccgcctcttccttgtttttgacgacaatgtgcctgattctgtaggaatcatcgaaatggtacagttctttatttttattataaaatgattgcatttccttatccgatatatcgatgtccttcgtcagcagttcttcaagaagaatgttgtagcggatctggtctctccattctttttcggtaatatggctgtcttcataaaatgaattattcaccgctttgattaaaagaaattcacgttccaattcggtgtttgaaactgtgagtttattctttttcgcaagttcttccactacttgtgcattaatcatatcctccagagttgattttccgtactcgtcttccatctttttcatccagtcctgccgtgtgatatgtttatcaccgattgtcgcgatggattcttcagatgaccccgcggcttgggattttgttaacttatacgccactgctacactgcataccaacagcgccgctacaataatcgtcaaaagtgttctcgatttcaaaatctaccccatcccttttacaaaatagaacaacccgctaaagagctagcgggttgtttcgtcacgaagctcttccagttcttcttttgtaaataaatatttctcattacaaaaatggcaaaccgcttcggcttttccgtcttcttctatcatatcttgtatttcttttttgcctagtcctaaaatggccgtttcgaatcgatcttttgaacaagaacagtgaaatttgaccggcattgtttcgagaacgtccggtttttgacccagaacttcttctaagatttcttccggtgtcaggcctttttgaatcaattttgaaatcggttcgatttgagataattgcttttcaattgttgaaatggtttcttcatcagtccccggaagaagctgaatgatgaacccgcccgcagcgagaatcgtgttatcaggatttactagtacacctaccccgacagatgaagggacttgttcagaagaaacaaggtaatacgtgaagtcatcaccgagttcacccgagacaatctctacttgccccgtaaaataatcacgcaagcccaaatcttttacgacactgagtgttccgtcagttccgaccgcccgtctgacatccagtttcccttgttcattgaggtcaaaatgaacgtgcgggtttgatacgtatgctcttacctcaccctttgcgttcgcatctgcgacaatggctccgatcgggccgccgccttctattttgactgtcagcttatcttcacccttaagcatcgctccgagcatcagagacgctgtcatcgtccggccgattgcggctgatgccgtcggccacgtgtcatgccttctttgcgcttcatttaccatatctgtcgttctggctgcataagcccgcactttaccgtcatatgcaattgctttaattaaataatccatcgtttacctcctatatgtgacccacgcgatttcgctcataaatgatttccagcccttttaaagtaagaaacgggtcaacaatatcaatacagtctgattcgtttgcgattaatgacgcaagcccccctgtcgcaatgactttcggttcttgtttggcctgccatttcatccgctttacaatgccttcaacttgtccgacatagccgaaaaggatgccggactgcatggcgcttaccgtgtttttgccgatgatattatccggtcgggcgatttcaattctcggaagcttggccgcgcgtgagtacagcgcttccgttgaaattgtaatgccgggagcaatcgcaccgcccatgtattgtttgttttcatcaatgtagcaatacgtcgtcgccgttccgaaatcaacaacaattaaggggccgccatactgctggatcgctgcaacggcattgacgatcctgtcagctcccacttctttcggattgtcatattttatatttaaacctgttttcattcccgggccgacaacctgcggctcgatgtgaaagtattttgtgcacattctttctaaagagaacataatcggcggcactacggatgagatgataatcccttcaatctgttcaaacatcagtccggaatgttcaaataaggagcggagcagcatgccgaattcgtcttctgttttgtgcctgctcgtttctatgcgccaatgatattctaattccccatcatgatatacaccaatcacggtgttggtgttccccacatctataaccagtaacaacctctatcaccacttttgaatagtttctaatcataacattttcaacattctacaataccatacacgatctgcggctcttttgtaaacaaaacggaaccagtaaaaaaaccgccggtatacgccggcggttttcatatcagaaagcgaactattctttcggctcgtctttcttttcgtcttctgttttagacaggatgtttactttcacatcgtctttttgaagatggtcatctgagaaattgcgctcagggagttttccgtgatccacgagatgcttgatttgttccgcatctaatgtttccacatcaagcaatgtctgagcaatcaattcaagcttatcgcgattttcagtcaggatggttttcgcacgctcataacattctttaatgatgcgctgaatttcctgatcaatttcgtaagcgatctgatcactgtagttttgctcgttgttgaaatcccggcccaggaatacttgaccgccttgagattgaccgaactgaagcggtccgagtttttctgacataccgaactctgtcaccattcttctggcaatgttcgttgcccgctggaagtcattgtgagcccccgtgctgacttcgccgaagataatttcctcggcaacacgtccgcccagaagaccgacaattttatcgagaagttcaggttttgtctggaagtaacggtcttctctcggaagcatgactgcgtatccgcctgcctgccccctcggaacaatcgttactttatgaaccatatcggcttcatccagcacaagtccgataacggtgtgaccgccctcgtggtacgccacgatattgcgttcttttttcgagatgacgcggctcttcttcgcaggacccgcaatgacacggtccgttgcttcatcaatgtcgcgcatatcaattttcttcttgttttgacgggcagcaacgagtgccgcttcgttaagaaggttttctaaatctgcgcctgagaaaccgggtgttcttgaagcgattgcttttaagttcaccgtctcatcaagcggtttgtttctcgcatgcacctgcaatacggcttcacggccgatgacatccggacggtctaccgtaatctgacggtcaaaacgtcccggacggagcaatgcagggtcaagaatgtccgcacggtttgtcgcagcgataataatgattccttcattcgcactgaaaccgtccatctcaacaagcagctggttcagcgtctgttcgcgttcatcatgcccgccgccaagaccggcgccgcgctgacgtcctaccgcgtcgatctcatcaatgaagatcaggcaaggcgcattctttttcgcattttcgaataaatcacgcacacgggaagcaccgacaccgacaaacatttcaacgaagtcagatccgctgatgctgaagaaaggaacgccagcttcaccggctgaggctctcgcaagcaatgtcttaccggttcccggaggtccgacaagcagcacgcctttagggatcctggcgccaagctcggcgaatttgcggggatctttcagaaactcaacaacctcaacgagctcctgcttctcctcatccgcgccggctacatctttaaacttcacgcgtttcttttcttccgtatacagcttcgctttgctctttccgaagttcatgacacggctgccgccgccctgagcctgattgagcaggaagaaaaacagaataaagatgatgacaaacggaatgatcgtcgttaagaacgtcacccacccgcttgtttcctgtgcgggatcaacttttacgtccgtctttttaattgcgtcaaatatctggtctgctccttttccttcaggaacatgtgttaaaaagtactggtctttgtcgtattttttcagctgtccttttacctcataaacacctctgacaggctgaaccgatacgctatcaactttcccttcatcgaggttcttgataaacgtactgtacgacatattttctgttttcgggtttgaggtctggaagtaactcacaaccccgattactactaataaaataagtaaataaaaaatggtattacggaagacccgattcattccttacctcctcccacagtaagcacaactatgttcaatagtaccatagaaaatcattccaatacaaccgataaccatctcggaagcaggcagccgatcagctttcataaatcgccggttttaatactccgatgtaaggcagattgcgatagcgctcggcataatcaagtccgtaacccacaacaaacgcgtcaggaacttcaaagcctacgaagtctgctttaatgtccgcttttcttccgcttggtttatccaacagggtaacaatcttaattgatttcgctttacgatatcggaagagttctacgagatagctcaaggttaacccactgtcgataatatcttcaatgattaagatgtcccggccttctacagatgtatccaaatctttgatgattttgacttctccggaagaaaccgtggaatttccgtagcttgatacatccatgaagtccatttccaaatatgtatcaatatgctttataagatcagccataaaaggaagcgctccctttaacacaccgattgccaacggaaacgtgtcgctgtactcgcttgttaattgttctccaagctgttttactttctgctggatctcatcttctgagatcagcactttttcgatatcctgtttcatgttaatgcttgccccctacacttttcatgctgtctatattgtaatacaatgcggtcactgtttgaaatcacaagatcgtcaaagatggattttttcaagccaggcagccagataatttcaccgctcgcatccgttacaatcggccattcgtcccgatcccgcagaggcagtttatgatcaataaatatatcttttacctttttcgagccattcatccctttaagtttaatccggtcgccgatttttctcgtccggattgttaaaggaaattgcaccttatttctgcttgtcataaaaacagcattcccatttttgatatgagggtcagcctgatcggccacctctatcataaagccgttggggagaacagcagtctcgccttccgctccttgcagctgcagctcaaagggaaccttttcacattgccattgttcaaatgtaaacaaacatgtctgatatgatttgaccaccttcagccctttcggaaaatcaagcactcccgaggcgcttccattttccgcccattccagaaactgctgtatgtggcgggcggaaaacgacgatggaacgttttcataaagatagtttaatattagttgaactcctcttctttgtaaaggtatcggaagggcaagcaattgagaggaatcgacttcaaccgatgtgtcagacttgcttgtaataaccttattcattcgttctttcgttaatgactgcaagtattgttcgtcttctgtcagtgcttcactcaccttttgaaacattttatgaacgtcaggtgattcttgttttaaaaaaggaagcacggtctttctgaatctgtttcttgtataatcgtcttttgcattgctctcatccgttctgtagctgagcccttcttgacggcagtattctaggatttcatccttttccgcatagaggaaaggcctgatcagccagccggatgcaaattcgcggacgggctgcattcccgcgagccctgcgccgagcgtacctttcgcaagcctcatgagcattgtctcaacctggtcatcgccgtgatgagccagcgccaaaaacttcgcttggtgttttgtcatcagatcttcgaaaaactgatatctgcaatcacgcgcggcagcctgcttgttcagcttattcttctttgcgtatgcagaaacatcaatctgtaccgtttcgcagaggatgtgttccgcttcgcaatatgactgcacaaacttcatatcttcttcagattcaggacccctgaactgatggtcgacatgcgccgctatgataacggaagaatgcccgaagtgcttattcagcatactgagaagcgccattgaatcagggcctccggagaccccggcaataatcgtttctccctccgcctgaagatgatatgttttgaaaaaatcttccacgcttttcacaatgtccccctcacaatgagcaggtttttttaaagatatacatatcctatcactttcattccctccaagcaaagaagaagcatgagcgcaggcgtccggccggcattagatgagaaaaaagacgatgtaagcgaaataaagggcgagaacgctgattaaaataagcgttgtttcaaacaaaccattgtgctttgcgggtttttgtttaggtttataccgcgtttgagatacagtgccctgccgcggttttgattgcggcggcttaggcttggcggcggctttccttttactcccggcgctctgccccgccgtcaggatgtcatgcttcatggcttccgcagacggatattggccgtttaaagcagaaaacagaaccttcttatacttattcagaaacgggtggccttcaatgatagaacgaagctgttctttcggctgtcctgactttttgcactctttcttctggacacagtggatcatgatcattgcgacagcaaacaggtcataggatggttctgcttttcttgttccatacccccaatagcccctgtcgtaaaactccgtatactctttaatcgcgcggccttgttttgtcgttccccctacatcaatgcagcggatggcagccggcggtccggttacaataagattttccggtttgaggtcgccaaaaacccatccctgctgatgaaggactgacaagctggaaagaagctgcaccatcagcaccggaatccactccgctcccttactgctgatatattgcggaagaagcggcccttctatgtactccatcacgtaaaaagagacatttttattcagctgcggaataaacgcatcgtccgcatcaaaaaaagaaggccccatcgtttgcgaccgggcctttgaaaaggattttaagacattcacttcagaggtaacagacatgctgtcgctgcttattttcaaagcgacctgtccgcctgatgcttctgccagatatacaataccgttagccccttttccaagctgtttgagcaatctgtaggatttgccgttccatttgccctgaattgccgtccccggtgccagactacatgccaaactcgttaaagcgtcgttcatcatctgccaacatgctccttcttgagcggattctctcaaactgctgcgtcgcttcccggatagcggggcccgtaggggtgataccgccggtcgacagcttcgcaaagagcgcagaaagggattcaagcttcggcgtccaattcagcacaagctcaacttcctggcttttcccgggaaatatacacatggcaaattcattttgtccggcccgggaatttaaactgatggaaagatcaatcagcgcttctttcaccgtcggcagtttcggcgccatactcgcactcgtatcaaccagcacaagcacctgcagatgaactgtttctccgagttcatcaaccacttccatcacttcgccgcgtttttccggagaaagctcttccatttcaacgtttttccctaagatttgtttaagctcttgattgacgacaccttgcagcgtctgggtcattgcttttttcgtcaccatttgaaccgtctgagacaattgtgacgcatatacaacttgatggacgccgccaccggccatggcgatgccttcaacttccttcattgcctcttggtcaatcgcgttttcttccataatccctataacattcaccgtaatcccctgctccttggcgaaagccgccattgcaatcgggtcttcaccatgattggagcagccatctgtaatcagcagaacttgatttaaatgtcccttattcacatacattcctcccggtgatacgattagtcccatcttcgccagaaggaaagtgatttatacgaaaggattaagaaatctcctttttattttggaataccgccggcaccggtatggaagcccatttcggcgtgttgtgatcaatccggacaacaaccaccgtcatatcgtcttcgatttggccggaacgcgttctgatgacctcttccattaatatatcagcgatttcctgcggatcttcggttttcagccctttcattttccgtttcatccacaggtcgtggttttcaacgtgcttcggtccttcaaaaataccgtcactcatcatgacgagcagatctcccgcttttaactgttcacttacaacctccacatcaaattcattgatgataccgatcggcagattgctggcctgcactttcatgacttgatctccccgcttgataaaactcggcgttgaaccgacctttaagaatttgcagcttgcatcctgaagatcaatgatagaaagatcgagagttgagtagatttcgtctgtcgtccgtaaagacagaatactgttgatcgttttgatcgctattttttcatcaatacctgattcgagaattttttcgagcagcttaatcgtttcgttgctctcataatgagccctcgccccattgcccatgccgtcactgattgcggccgcatattttctcgcccccagttccatcatgctgtagctgtcgccggagacaaggccgccgccttttgccgcatgagccgcgcctgtcgatacccggtacgatttggtcgaaccgaacgcaacatggctgtagccattcggatgagccgagtgctgttcgcttttgacaagtatctgctcctcaagaatgtcagacagcatcggggcgataattttctcactctcgccgtgtcctccgctgaacgggattgtcatttcgatatcaatattgccctgctccaagctgtatatctcgacatgctgaatctcgattccgaaatgctgaagcgcctctatcatttgttcttcctgaataaaatgctgctccctctcccgttttatttcccgagaaaagtccgccataacctcagaaacccccaacagctgctcggcaacaagcctcctgctgtcctgaacttttctcttcagtgtcagatgggcgtgatggtgggcaagttcgtcctcaatcagctcttccacctgtctggatttggaacagtgctgttgaaactcttttttcaatctgcggtttgaggcatactgcttttcttctgtttcatgcataacttgtttcattaagtcatatgttttatcaaagttttgaacccagcatttgctttttttatagcaggattggcaggaatgctcggtgattttgcttaaaaagagatccacttccccttcttccgcctgctcatcggaagacgtctgatgaaaggtggcgaagctctccgacaaggcatgaaacacattggagaactggtctactttctgggcggtgacatctctgattttcctcgcgtactgctgctgctcctgactgtgctcagcagtgcccggtatgtatcgcgccacctttttcgtaatcgattggggcgtaatcaaaaacaatacaacggcaatcaaagattcataaagagtggtcattaatccggcagacccttcaccatataatgaaatcagcagtgagccgatcaccaatccgactgcggcgccggctttctttccttctttcagcagcccgccaagaagcccggaaaacgcaagcagactcatttgatagagattcccgatattcgcaagcccgaggatcagtccggtcacaacaccgaccgtacagccgatgcttgccccgccgacaaaggaaaaactcagcacgacatagcgggccaggatatgttcagcctgcattccctgaaatgaaacaccggcaagcccggttaaaacggatgcgatcaagatcataaaacagatgatttcttctatttttaacgattgcttcacttttttgatcgtgaaaatcggcaggctttgtaaaaagatcagcgtcaaaataaaggccaggcccgcctcgacaacagccatcacataatcataggtggtaaaagcgccgctttcaaaataaacaaatccgattctcgcggcagccatagagaaaaacaccacgatcggcagcatcttcacccggtcctgcacgatatatgtaccgatttttgaaaatagagtgaagacggccaaagctgtgagaatcaataaagagtgtttcggcgaaatggttaaagcgcccgcaagtaaagacagacaagcatagaaggctttatctcttctgatcaaaagcatcgctccgaaaaacggcagtgcaaatggaagaacctcagataatatgaaagcccgtccaagtaaaaaaccgatcacgacataaatgaaacccttatagaaaaaaagtgaatgcgcttgatggactgtaagctttgccgccttttcaaaaaacgattgcagtttttccagagcttgtcccgccatcggcccgttcactcttctttccgctttttccattgctctcatcccccacctgttttattcgttgcttgtcattataaatgaaagcccagataggattttgtcaaaagaaggtaacaattccaaagaactcttcgacgctttctcccttgttcccctttccttttgtatttcctccgacatttctcaaaaagttgtctaaatatgaaaaaatcggcttctgcaacagaagccgattcgcttgatgacccgtacgggattcgaacccgtgttaccgccgtgaaagggcggtgtcttaaccgcttgaccaacgggccagatatatatggtagcggcggaggggatcgaacccccgacctcacgggtatgaaccgtacgctctagccagctgagctacaccgccatataggtgcttataagcacaagttatataatacaaaggtttcttcattccgtcaacagaaactttaaagttttaattttctgactacatgcgcgtatacaaaaaaagcacccgctgggatagacggatgctccatgtatttatagaaagcagcaagttatcctcttcttgctccgcgccctccacgttttgattccgtgtttcgttttaaagatgataagcggtcttcgctatctttaagaaacttgttcattttctgttcaaaagattctttcggacggaaatcatttctaggtctggcttgcggacggtctttagcttttttaattgataaaccaattttcccgtctttttcaacgttgatgactttcacttcaacttgatcgccgacttttaaatgctcgttaatgtcttttacataattatcggctacctcactgatatgaacgagaccggttgagcctccaggcaattcaacaaatgctccgaaatttgtaatacctgttattttcccttgcaacttgctgccaacttcaatcgacataaaaaaagtgctcctccttaggcttataaaaagatcgtttgtttaattatacctaaataaaaatttaagtgtcaacaaggctacttgctcttcttttctacattaaagagaatctcaccatttcctgacataaacaagtctcttctggcaagctctgtgacgtaatcctcatcctttaatttggaaatttcatcttttaaatcagcctgtttcgcattcaattctttaacttgtttttccagctgagcctttttttcttcgtttgcgctaagggaagaggtctgtgaccacagagaacccgctaagacaatagccgtcaacaacacaagggcgccgaatacgatcaaccgtctgaaaagccctttccgccttcttttcataagctgggattgccgttcaacctgctctttatagtcgttttgaatttcagttattgtacgttccctagatagattcaaaccagacggtcctcctttcaccttttcaaaatacgtatcatggtcgatctgattgttatgattagtttcttgctcttttgtaaaaatcctgcacttttttgaaaatatcgtttgaaagtaagacgccacttttcaggaagaagtttcaataattgtttcaacaggaaaaacagcggatacagcaaaaacgctacgatcttaaaaagacacttcgcaaaaaaggcactcacccgataggagtataaagaaataaccgtgatcagcccgatgagcagcttaaagagcagaagcaccggacggaacagcacgtgctgaatgagcttttttgcgaattggtaaagagacaccgcaagatgaatggcaaatttcagtatttttatatacattcgtttaaacaggctttggtacgtcgcaatacccagtaagacagccaagaaaatgtataccctgagttccccttcattcacgttgagcagcacatagaaaaacagcagaccttgtacaatccaaaagagaatgtcatgaatgaataacagccatctggccgttttggcgcggctgacaaacagcctgtatgtatcaagcgacgctccgagccaggcgcccataccggtcattgccagcatcgtataaaattgggtcgtcagcgtcatttaaacaacttgctaaaaaaccctttagctttatccccttgctgctcgtctaaatatacaaggtcaaacaccctgccttttatagatacaatccctttttccacatcaaggtttttcatctgcagattctcgcctctgacggaaagcattcccataaccgtttccagcaaaaactcttcgttatcaaaactttccacatgcttgacgcccgaaatgtctaaatgctttctccctttcatcgttacatcatgctgttccggaacagaagaagaacctttttgctcataatatgaattcatctattcagcccccatatcctcgatacttttagcattattactgcattgtatgaggcgggagccttgtttagaacaagcctattcgccgagtttttcttctttgacgattgtatacatgcccgcggcttcttcttttttcgttgtttctttcaattcatttaccttcacggtgacaagcttctgcccgaagcggaccttcagttcatcaccggcttttacgtctgagctggctttcgcctgattcccgttaacggtgattctcccttgatcggcgacctctttcgccaatgtgcgtcgcttaattaatctggatacttttaaaaatttatcaagtctcatatcagaatctcctctccatttcttttgcttcatcccacaatttgtccatttcctcaagtgacattgcggtcaattcaaggccctttgctgccgcttctttctcaatataagcaaagcgtctgcggaatttgtcatttgtcatggcgagcgcttcctcaggctcaattttatagtatcggccgatattgaccaatgcaaataaaacatcgccgaattcagcttttaagctgatttcatctgctgattcggcggaagcctctgcagaaaattccttcagctcttcatttactttatcccatatgtcctgaacgttatcccagtcaaagccggtttttgcggcttttttctgaagcttggcggctttcgcaagagaaggcagtgttttcggcacggcatccagcaatgaagaggatgttgtttgcttttccgcctttttgatttcttcccagttggcgacgacatcatgttcatcctgaaccttaacatccttaaacacatgcgggtgccgtctgaccatcttcgcactgatgtctctgatgacatcatcaattgagaaatacccctcgtcttctccgatctgggcgtgcagcataacctgaagcatgacgtccccgagttcttctatcatgtgatccgtgtcctcttcgtcaatggcctcaagcagttcgtagcattcctcaatcatatatttctttaatgactggtgtgtctgcttttgatcccacggacagccgttcggcccgcgaagctcgcgaataatacttcggaatgcagaaaattcctggtaaaggagttcttcttttttaatcggcggaacatacacgcttgttaagttatttatttctacattgcggtcaagttcaaacaaaggcaccttgatcatcttttctcccttgctcccggctgctgtaacgatgaccacttcatagtcgtcaggcaatttctccatgagcgtcagcttcacctcagaggccgtcatttggtcataaacctggcagatgatcaggtgatgccggagttcgagctcatccggcgtcattgtttgcgcatccgtaaattgaaacccttcaatcggatcaattcgcaacgcattaaaagtggcatccagaaagctttgccctccagcggtatgaacatctatctgttgttcttcccggcgttcaaataacagctgaacggttttctcagcgacaaacggatgcccgggtacagcgtagacgacatcctcttgcttcgctttttcaaacagaatgtccgcgatctcttcatagaccgcttcaaactgatcatgtttttcataaatatcatcaaaataccggatgtccgcttccgtctcttgctctaattccgaaatcaaagggtggtctttcgttcttatatataaatgcttcgcctgagtcagcagcttatgtacgcccactgtcaactgatccatgtctccggcgccgaggccgacgaccgtaatattacctgccatgtttttctctcctctttttcaatttgcttaaagcactgccgaaaggaagaccgctcagctcttcgtccgtgaaaatcttcattcttatcatacaataaataaacaatagccctccgatgattgacgcagacagactctcacatacagctccgcccctgctgacaggaacaaataactgccaaagcttcatgtatacgaccaaaaagaagaccatcagcagactgcaccagcacagacgggcaatcacgcctccgatattcgtcagccatcccttcgaccaaattctccggagattcaggcacgcaactgcggcaaatgccaagacggtcgccagtgccgctcctgtaataccccagccggggaccagccaaacattcagcacccatttcagcgcccctcccgccaaaacggatacggcggggaaaacggtatgtcccgctccttgcagaattgcggctgccgtaagcgcaatcgaggcaaaaaagatagataagctgaatatttgtaaggtcggcgtcccctcactgttttggaaaagcatgatattcaccggttctaaaatgcaaaaaagcccggctgatgcaccgatccctaccgcaaggcagagcttgacggcagatgacgctttctcttttatgataaacggcttgttctcatgcaccgcttttgaaattgaaggaaccaaggacgcggcgatactgacggcaaacacggttcccagctgaaggagcggctgtccgcggtcatatatgcctttcagctgtttcgcggcatggctctccgtcccgtctgaaagcagtgaatataagtttaaggcgtctacaagctgaatcaaaagcatgagtacactgctgatacagatggtgactgaataaagcagcagcttttttacaatgacggccgtttcgatatgtccgccgtctttctttgtttcttcccgcttataccagaaaacagccaatacacaaagggccgcaaagctcccggcaattgatcccgaggccgcccccgcacccgccgcgtataatgaacgcccgcttttcaaaagccagaaggataaaccgagaagcaccgccacccgaagaagctgttccgtaatctgggataaggctgacggcatcatatcatgcacgccttggaaatacccccggaaaaccgccgtaaacggaaacagtatgaaagcgaacgccgcgacccttatcagcatcacaaggcgggcatcacccataaaaccggccaacggcgccgcgccggcatacatgagcgcaaacagaacaagtccggccgccgtgacataaagggcggaaattttcattattttttgtttatgatcgctataatcgttcattaattttgagatgatcaccggaaaaccggatgttgacagcatgaccgcgatccctaaaaacggatacacctgctgataaatgtaaaatccgacgtcaccgacaatattctgaaaaggaaccctgtacacggcgcttaatatcttcgtcacgatgcccgcaacgacgagcacaaaagcacctttccatgccgattgccgcttggcgccaactgaatcgttcatccaaaagctccttccagccgctagaaaattacgtctataaaacgagcttattatatcacaatcctaacggccgaaccgatagagagcacatatgaatatgaaaaagaacagcacttgtataagagctgttctttccccgttttcttatttcaataatggtaataagacctactgctccatttgtctcgccaaaaaactggctgccgtttctaccgctttatgttctacttctccaagcgcctgttccttggaaaagatgaccacggcaccgataggatcgccatttgccacgatcggagcgattgtataggagctcatatcttcatcaatgtcattcacaagctgcgcggacttcacgtcgttttctaccactgagctgcgctgatccatcgttttttcgagcaaatcgctgatggctttattcagaaattcttttttcgaactgcccgaaacggcaatatacgcgtcacggtcgcaaatcaagacggaatggccgagactgtcatacaatgcatctgcatattctttcgcaaaatcgccaagctcactgataggagaatattttttcaatataacttctccgtcgcggtcaacgaatatttcaagcgggtctccttccctgattcgcagtgttctccgaatttctttaggaatgacgacccgtcctagatcatcaatacgacgtacgatacctgtagctttcatctctctggtgcctctctttcatgtgatgatatttaagggaaagtactaaagctctttactttatgtagcttccgccactcgcttgaaattagtatccgtcacatcaaatgtaatatacaccagagagtaacaatttttatgaagacgcgattgtttctttcttcacattctgaaggcctttcagcatgccgagcacggtctccagccactcttccgttttgcggcctttcgtctgtactgagattttcagctttttcccttccattcccagtccgatctgccggccgtatttattgccgagttcgaataatttctggccgtcaatctgtgcgctggcctcttcagaaatggtaaatctgatcgcgtctttatcctgcttgatgagttcgacgcgttcatattttccgtataccttcatctcagcaaccgtaaacagccattcaacttctttaggatagctgccgaacctgtcgatgatttcatcttggagctcatttttctcctcaattgtggcgattgatctgaagcgtttatacatgtcgattttttgcttgccgtcttgtatatagttttcaggaatatacgcgtcaagctcgatatcgatttctgtctcaaactgttcgcttttcggaatatcgcctttccgctcttcaatcgcttccttgagcatttgcgagtacaggtcaaaaccgactgagtcgataaagccgtgctgctgggcgccgagaaggttccccgctcccctgatcgtcaagtcacgcatggcgattttaaagcctgatcccagctcggtaaattctttaatcgcctgcagccgtttttccgccacctcagtaagcactttgtctctgcggtacgtaaaataagcgtaagcgacgcggttggaacggccgacccgtcctctcagctgatacagctgagacagccccattttgtctccgtcgaacacaatcaaggtattgacatttggtatatctacgcctgtctcaataatagtcgtgctgacaaggacgtctgattccccttccagaaaattgagcatgacgctttccaattcattttcggtcatttttccgtgggcatatgccacttttgcatcgggaacaagcatggaaatttcatcagccttccgctcgatgtcatccacgcggttgtacaggaaatatacctgtcctccgcgcgccagttctctttcgatagcttctcgtacaagcgcgccgttgtattccacgacatatgtctgaacagggaaacggttttccggcggcgtttcaataacggataaatcccgcacaccgagcatggacatatgaagcgtacgcggaatcggcgtcgctgtaagagtcagtacatcgacattggctttgatctgtttgattttttccttatgcgttacgccgaagcgctgctcttcatcaatgatgagcaagccgagatctttatagacgacgtctttagataagagcctgtgggttccgattacgatgtctaccgttccgtttttcagtcctttaatcgtttcattggattcttttctcgttctgaatcggctgagaagaccgatgttaatcggatagtcctgaaaacgctccgtaatggtttcataatgctgctgcgcgagtattgtcgtcggcacaagaagcgcgacctgctttccgtctgcgatcgctttaaaggccgctcggatggctacctccgtcttcccgtaacccacatcgccgcaaagcaaacggtccatcgggcgttctctttccatatcctttttaatctcctgaatggaacggagctggtcctctgtttcctggtaagggaaagcagattcgaactgccgctgcatttcatgatcgggcgagaacgcatagcctttgcttgcttcccgttccgcataaagcttaatcagatcatcggcaatatcctgaacggagttttcaacttttttcttcacccgtttccattcactgccgcccagtttataaagcttcggttcttttccttcagagccgacatacttctgcacctgatcgatttgttctacagggacatacagcttatcgctgccctgataatgaatgttgaggtaatctttatgaatgcctttgatttccagtgtttcgatccccaagtacttaccgatcccgtggttgacgtggacgacatagtcaccgacctgaagctcggaatagcttttgatccgttcggcatttgtcagcttctgctttctcggctttttcttgattcggtttttgaacagctcttcctccgtaatgacggccagcttcatcagcggcagttcaaaaccggattgcagctcgccttccatgacatagacctgtccttgcacaagcgctttggagctgtccgttttcgcggcttcaatttcgtaatcagccagcacggatgccaatctgtcggttctgtccttatttgcgcctaaaaagacgacggtgaagtttgatttcttaaagcgctccatttcacctgagaggacattcatctgcccgtgaaaactctgcatctgccggcttgtcacattcacgatattctgagggcttgtatgctggacatgacgcaaaaataatgaataataaatagccgggcgccgcttttcgctcataagctcctgaaagctgaaggataaatgaatgtcatgcagaattttcccttcctcgagcagacttgtcgtaaattcggcctcttctttttgcagctgatcctccatttcatgaatgcggctgacctcgtctaacaataacaacgtgtctgccggtgtataatctagcaaactagcaggtttttcgtaaaagtacgagagatacttcacaagttcctgatcagtctgtcccgttgataaccgttctttatcatgtgagatattgatatgaagcatttccttttgtttgtcctgcttcagctttttcagactgtcggcaagccctttatcgagcctttccattgcccgggctttttcttccgccctgatgatcaattccttcgccggtccgatcgccacatgtttgagcgtctcgattgatctctggtcatcagaattgaagcttctgatggaatcgacctccgtatcaaacagttcaattcgcaccggatgctccgacgtcagcggataaatgtcgataattccgccgcgaatactgaattcaccgggtgcagaaaccatatcggaacgctcataccccacctctacaaggcgcgcggacagctgatccggttctatatcgtctccgagtgaaatgacgagctggctgcttttccacagctccttcggcggaagcattcttctcactgccgcaacgggcgccacaacgaccggcgcttctccgtttgttaatctattaatgacatcaagccgctgagcgcgcagttcaggactcgctaccgcaatttctgaagaaatcaattcattcacggggtataaaaaaacagattgatccccgagaagcgccgtcagatcttccgtcactttttgggcctgatataaattatgggtgataaagaaaatcggccttttcgtttcctgtgcaagggcggaggtaaaaacagaacgcgcggaacctgacagacccgcaagcagctgttccttcagcccctcatgtaaaccgttgacaatggatttaaaatcatcgctttctttaataaaggtttgaatgttgtccatatgggccctcctctctattttctgcaagaacagaaaaacgctttggtctagaatctacaccaaagcttcttattgaataaatgtgttgtgttcatggtagtgcggattgcgttccagcgcctcttggcagtcttcacaaattgtaagaacatggacatctccattgtctttatatgaaatcatatcgtttctttcctcatttgttaagtgctgaaatccaagtgactgtgtcggcaccgttgaatattccaggctccctaccttaaagccgcagtggcggcagaaataatgcaaagccatacgttggacctcctgatgtgaaaaaatcatttttccctagtatggtctcccattatttatcttatacatttgcattaaattcgttcatgacttctaaaaatggtttcgttaaggaagcttcgcaggcttttacggtttttgagacggcatcattgatatgcggcgcttcttccttcgtaaaagctcccagtacatagtcaacgactttcattccgttaacggggcggccgattccgattctgacccggtcaaattcaggggttccgaggtgctgtataagcgatttaattccgttatgtccccctgcgctccccttcgtccgaagcctgatttttcccgtcggaagatcaaggtcatcgtatatgactttcagatcttcatgatcggcatcataataatccagcagcggccgcaaacattctcctgataaattcatatatgtaagcggtttaacaagtagaactttttttccggaaacaaaccccattccgtaaagtccgttgaatttcgttttattcagttcaatattccattctttagaaagctcgtcaatggccataaagccgacattatgcctcgtgttctcataggtttttcccgggttaccgagaccggcaatcacaagcatcgtaaatcctccctcaacatcgctgtaattcttctcattctagcacaaaagacgtaacctcgggcgggttacgtcttaaagcgcttattgattttctccttcgggctcttcctcaggagacggttctgcatcttcttcgaatgcttcctgcttaggaggaaggatggaagccacgacttcttccgggtcgtttgtaaatgtataattgccgtcagcagtcagatctgcgatggtcagcacatcattcatttcaagcccggaaatatcaacattaattgtctgagggatgtccttcggcttagccttgatcgaaagctcatgcagcggctgctggataacgcctccgtctttgactcctttcgcctctcccgtcagctgaatcggcacctcggcctcgagctcctcactcatattcacgacttgaaaatcggcgtgcgtcaattcgtttttgagcgggtctgtctgaagatcagtcaccataaccgattgctgatttccgttgacatcaattgtgataatcgtgttttttccttcgtcccgcaatgttttaagcaattcgacactgtctaaagagacaggcgtattcgttatttctttaccgtatataatccctggaacatgtcctgaatgacggattttccgaagcgtcgaacgtttaaaatctgttctttcatttgcttttaaagttgccatattcagcaccatcctaattatcgttttatcgtcctattagaacaatacccacaataactgggatttaaaccttaaagtttcggtttagctgaataaatagctgacagattgtttctcgtgaacgcggataatcgcttcagccagaagcggtccgacagaaagctgcttaaagcggtcgatttttttctcatcaggaagcttaatgctgttcgttacgacaagctccttgattttagagttattgatccgctcaacggcagggcctgacaatacagggtgcgtacagcatgcatacacttctgcagctccgttttcaaccagcgcgttagcggcaagtgtgattgtgccggccgtatcaataatatcatcgatcagaatcgctgtttttccttccacgttaccgacgatgttcatcacttctacctcattcggtctaggacggcgtttgtcgataatcgcgatcggcgctttcagacggtccgcaagtttgcgggcgcgcgtcacaccgccgtggtcaggagaaacaataacgatatctttcaagtctttaccttcaaagtaatggcctaaaatcggaacacccattaagtggtcaatcggaatatcaaagaaaccttgaatttgcggcgcgtgtaaatcaagcgcaatcacgcgtgtcgcacccgctgtttcaagcaggtttgcaaaaagttttgccgtaatcggttcacgtgatcttgcttttctgtcctggcgcgcataaccgtagtacggaatcacaatgttgattgttttcgcggaagcgcgctttagagcgtcaaccataatcagcaattccataatgtgctcattaaccggcgcacttgtagactgaatgatatagcaatcacagccgcgaatactttcttctatgttgatctggacctctccgtcactgaatcttgtaacagagcactttcctaattgaacccctacattatccgcgatttcttttgcaagttctggatttgaattcaaagaaaaaatctttaaattcttatctccgtattcgttagacatggtaaacctccgattttaggattattttttatgaatatttttcacataatcttctttatttacttgtcttgctctggcaatggcaagcgcttcgcccggcacatcttcagttacggttgaacccgcagcgacatacgcgccttctcccactgtgacaggagcgaccagattggagttgcagcctataaaagcgccgtcttcaatcttggttaaatattttttcttcccatcataattgaccgtgatggagccgcagcccagattcacatccgtgcccacttcggcatcaccgatatagcttaaatgagatgctttgcttcggtcgccgaattgtgttttcttgatttcaacaaagtttccgatcttcacttcattgccgattgcggaatcgggtctgatgtgagcaaaaggaccgatatttacatcattcccaactttgctgcggttgacaacggattgtttaatcacagtgcggctgccgattgaactgtcctctatctcagtgtgagggccgatgacacattcatcgccgatttcagcttgtccctttaacacagttccgggataaataactgtatcttgtccgatacgcgcgtcaggtgagatgtacgtattcatcggatcgattaaagtgactccgttctgcatatgccgtttgttaatacgctctttcatatacatttcagcctgagaaagagcgactctatcattcactccgagcgtctcttggaagttaccagtctggtaagcggcaacagtttcgccttcgtctttgaggatttcgatcacatccggcagataatactcgccttgggcattttcattcgaaacctgttcgatgacacgaaaaagagcctcgttatcaaaacagtacgttcccgtgttgatttctttcacaagacgttcttgctccgaagcatccttgtgctccacgattttttgaacggcgccgtcttcactgcggatgattcttccgtatccggcgggatcgtcggcaacggccgttaacaccgtggcttttgcacctttgtctgtatgttcattcagcatggcttccatcgtctccgccgtcagaagcggtgtatcgccgcaaataacgatcgtgacacccttttctccgtgaagaaatggttttgcctgcttgaccgcatgagccgtaccgagctgttctgcttggagagcgtaatcgcttttctgtccgagctgcttcttcacatcttcggcgccgtgtcctacgatggtgacaagcttcgctaaagataatttcagagcttcgtctgcgacgtgctctaccataggctttccgcataccggatgaaggaccttataaagcttcgatttcattctcgttccttttccggcagctaaaatcactgcaaaccgcttatccatttaatggcctccaatatcccttttatccatagaaaaatatatcctaaatagctgttgatttcaagaagacatcaaaaagtgcaagaattttctatgtaatcgctttattactgaaaaatcagatttaaaaaaggactgccggaaaaggccttgtgtcagcctttatcagcagtccttacattttgttatgtttaagaagccccggcttcttcatattctaatgcttcagaatcacccaaacgatgatactcatttaaaacagcatcctggatcttgccccgcgtgctggaattaataggatgagcaatatcgcggaattctccatcaggggtgcgtttactcggcatcgcaacgaaaagaccattgtttccatcaatcacacgaatatcatgtacgacaaattcgtgatccagcgtgatggatgcaatcgctctcatgcgaccatcggtattcacgcggcgtaatcttacgtcagtaacttccacagtagttcaccaccttttccctatataaaagcattagtctaacaattccacgattctttttaaattcctgcacgtttcaaaaagtttttttgaaaatataggatatacatacacaattaggtgataaaccatatttggggatcatatactgcataaaaaaagtgatcccggagaccggaaccacttttctgagatttaagattttaccagcgcaatgacttcaatttccacgagagcgtctttcggcagtctcgccacttccacacaagaccttgccggcttatgtacatcaaagtattgtccgtacacttcattcacttccgcaaactgctccatatcagcaataaataccgttgctttgacaaccgtctcgagagaagcgcccgcttctttcagcacagcttttaaattgctgaacacctgatgcgtttgttctgtgatatcaccgtttaccatttctccttcagcagtaagaggaatctggcctgagctgtaaaacatgttgtttacgatgattccctgtgaatatggcccgatcgctgccggcgcgtgtttcgtatggattgctttagtcatttttctgtctccccattctttaaatgctgttctttaaaaaatcgcagaaaattgccgttttgaatctcaatcgttttgtctttcatattgatggttgaaagcgtgagcagtgacatgtattcatcgacaagccgttcattcactccctcggcttcaaccaagacgcctatccccgcgacgtttgcattaaactcatcaagcaggctgatcatgccgttaatggtgccgccggctttcataaagtcgtcaataatcaaaacgttcgaacccgtagccaaacttcttttcgcaagcgacattgtttgaatgcggttagacgatcctgatacataattgatgctcaccgtggagccttcagtcactttattgtcctttcgtacgatgacaaccggaacgttcagataactggccgctgcgtaagcaagagggattccttttgtcgcaacggtcatcaccacatcaatctcccgctccgcaaaaacggaagcaaaaagcctgcctacatgagagaggacagatggttttcctaagatatccgttaaatatacataaccgcccggaaggatacgctcaggatttactaaagactgtcccagctcctgtataaacgcttctgcttcagcctgtttcactttcggaatgtatttgacgcctccggcagctcccggcactgtaagcagcgtcccaatgccttgctgttcaaaggtctgtttaataatcgttaaatcttcactgattgatgactttgctgattgataccgttctgagaaaaacgttaacggtattaattcatgcggatgggttaacaaataatttgttaagtccaccaatctgccgctgcgacgaaacttcatgaacttacccccaaaatccgaataatttaaaaataatataacttaacatacggatttaatcaagagcattctgttcgccgatcatccgcaccgcgtacacttgatcacagaaacctcttaacccgttataaatccgctgcacctttgattcgtattgaaccaaaccgaatacagtcggtccgcttccgctcattaacaccgcatcagcgccgaagcgtttcatttgatttttaatcatcgccacctcgggatggaggctgagcgtaaccgactccaatacgtttcctaattgtccgcataccttttggaagcttttttcttcaatcgcgtcaatcatcgcctgcacatcaggatgccgaacctgctgtaagttcagccggcggtacacttcggcagtcgataccccgatcgtcggtttggcgagcatgacccagcaatgaggcggagcactgatgtgcctgatcttctcaccgcgtccggttgccagggcagtgcctccgtatacacagaaggacacgtctgaaccgatttcagctccaagctctgcaagctcttcgacagaaagctttaaatcccaaagcctgttcagccctctgagcgtagctgccgcatcgctgcttccgccggcaagccctgccgctacagggatcacctttgtaatcataatcgaaacgccttttttaacttgaaaccgttctttaagcagtttggctgcctgataagccagattcctttgatcatccggaacaaagcgattatgcgacgccactctgataacgttttcgggcagttctgtcagttcaatccgatctgccaaatcaattgtcgtcatgatcatctccacttcgtgataaccatccgggcgtttactcgtcacatcgagggacagattgattttggccggcgctttttctaaaatacgcatagctttcacctacttctccatctaaacataagtatgaacattgtatcacatttggagacccggaggtacttatccgaaattgacgccggttttgacagccgatagaaaaaaccggggaacggattgtcccccgggccactgcattatcggttattttggttctgagccgccatctgctgttcggcaatctcgatcgcgcgctttaccatattcccggcgtcacgcgcccgaatgcctccccagccctcgtttttcaccgtatcgtaaaaaccaaggtccttcgccagctcatatttgaactcatctgacataactccacgacgtctgcccaaacgaaacaaccccttttatagaattgatcaccattcgtgcacgccacgataaaacatgtgacacctatagcttccgtttaatcggctgaaactttcgagggaataattagaagagctttagaaggcaaaacaaaaagcagtaaacaaaaggttcactgcccattaaaatgctactgagcttgccgcatcgtcattgaatgtcaattcaacagtctcagtcagaatatcagcataactgtatgaaactctttcaaacgaattctcgtcttgatctagttgtatcacaaaaacagaagggtacgtctcagctaaaatgcccgaacgctcaatcgtttttcggcggccgccgtttgcttttaacgtaagccgtttacctaaattcccatcaagcgatctttttatatcggacaacgtcttcgccattgcatccacctcactacatttattgtacaacaagagcccaattttgtcaaataaaatttaaattatatcaacgttaataagtcattgtcaacaaaattattttgacaaaattctattgatttctgcgttatttttcacaagttccggaaatttatgtatcaatatgtaaaataattaacccgcatagcgaaatatatgcgggttttatcactcatccatttgatttatacggcataccgacacgcagcacacccttcgtttcaattcctcccagccctttctctctcgtcagcgtatttctcaggacatcccatacattgatccgctccataaacggagtgaagctgattttcgcgacaatatataccgggtcaagcgcatgaatattgacgcgtgacggcgaacttgcgaaattcgcgcccgctctgattaaagactcaaaatgagattggcacgcccccgcgaatatgaccagctgatccaaatgagggactttacgcctcgctctctgaacggtttcgacaaagtgtttggaatgcctgtaggcgcttaaatcgttcacgcctcccttatgcttggaatatgcatcatggccggtgatgactaaaatatccggcctgtatttatcaagcagctcgtcaattgacgccggcatttttttctcatggcaatgaattccgtataccggcacaccgattttttcataaaagttcaggcactttttcaaataggcctcatcgccgtccagatgcaatacctttccgggcatatgaaagtagtgctcctgatgctgatattgatttgtcgcgtaatactcctgtttttcccgaagcagcttataatcctggcggagcagctcgagagattcattcatcctgctttcatctcttttctttctcatggcctgttcgtcttttctgacaggctccaaatcagaaaaatcagcatccgcaatcaatctgacttcgtcaccatgcaggatggcaattgaatttccgttgcttgtttgctctataccgataatgcgaaataaaacatccatttgataggatttcctggctaccatatctcctatttgaaattgcacgttacccactccacaaatagactaagcctcatcatgaaagaagtcttggcaaatgcacctctttccgctgcggcgcttgatgtttcaagcttttcttgcagttgaatgaataaggttctcctctagcctatgtagcggcagtccaagtggtgacgcaaaacaaaaagccctcttagaaaagggctttatgcaatccgttggacaagagcgcgaattcttctatggacagggattcaccgcgtcgctttccatcaatattcgtttcttgaagaacttcttcaatttgagcttttttctcttttccgcccggaagattgttcacaaggttgttcagcaaggttttccggcgctgtgcgaagcttgctttaatcagctggaagaaaaacggttcattatcgacgtcaaccgccgggccgtcacgaagcaagagacggatgacggcggaatcgacattaggctgaggcacaaacaccgttttcggtacggtcatgacggttttggcctccgtatagaactgaaccgcaatggaaagcgatccgtactccttagaggaaggatcagcggccatccgctcagcgacctctttttgcagcattacgacaattccttttaacggaagatgttcttccaaaagcttcatgatgatcggcgtcgtcacataatatgggagattcgccgtcaccataatttcatcacaatcctgaaactgctcttcaatgacggatttgacgtctgctttcagcacatcttgatgaatgatcgttacattgtcatacggagacagcgtatcattgagaatgggcagcagacgctgatcaatttcaaacgcgacgacctttttcgcccgtttggcaagctgctctgtcaacgcgccgattccgggcccgatttcaatgactccggtccgatccgtaatttccgcatggtccacaattctgtccaatatatttgtatcaattaagaaattctgtcccagactctttttaaaagagaaaccgtactttttcagaatttccttcgttctgataggtgtcgcgatatctttattgttcatcctgttcctcctgcctcatagcatcgagcgcatcaataaaatcacttcttttgatttgaaacatttgcagccgtttttgaagctgcttgccgtttgtatagccgatcttcagcaggtcgcccaatcgttcgcgccgtcttttggcagccggtccgccgatcagaccggcctgtatgacatcttcagctgaaatttcactcggctttgcctccatctcttcatgcacattttccagacatgctctgatgctttcaatggatgcgtgctcaacgccaatgccgcgcttgtttttcggtttggcaagatgtttgggcagaaatgcgtgtttacagccgggtactgcttcagaaatggttttccggatcttctcccccggaaaatccgggtccgtcagcacgatgacccctctcgtttcctgcgccagccgaatctgcctgatgacttcgtctccgattgcggaaccgtttgtctcgatcgtatccgcatcaacggcaagttttatgcgcgcagtgtcatcgcgtccctcgactactataatttctttaattttcattacttcctccaaaaaaactttttatatccaaaacgaaacctttgcttgcatgtcacgtctaatatactgaaaatacactttacctattataacgaaaaaaacagagggcgcaaaaccctctgaatgaatcggaattaatttaagatttttattttgacctgtttctttccccagcggtaagctgaagatttttcagggaaaaagacatcaatccgtcttcctttaatggctgagcctgtatcagcggctacggcatccccgtatccgtctacgtggactcttgtgccgagcgggatgacgcttgggtctaccgcaatgactttggcattcggattgcttgtcaggttaacgcctgtagccgtttggccggaacagccgctgcagcttgcggtataagccgtggaagacacggtaatcactttaccggaagatccggtttcgcccgaagatgccttcacaggtgcactgagctgctcaatcttgggactgtgccgctttgtgccgaccgcaatgatctgatctttgcttttttcagatgtttcttctttgacaagctttcttgatacttcttttccattttctttgacaacatgaaaatgctttttaagtttgccttcttttcctttttgaacgatcttttctttcccgctgtcgagagacgcatcttctttttctttcacttgatacgctattttttcctcaactacatcggtgactttttcgatacgagtgatttgtatgccggcctgattttttgtgagcttttcgtgtaatgccggttttactttatcttcgtctttcatgtccatcttatgctgcgttaaaaagtcagcgaccgtagtcgaagtcgtccatattttctttttctttcccgcatcatttacagtgacctgaaaagccgggtcgaccgtgactttcatgccgtttgtcactttcgtatctgctgctggatctattttatcgtgctgattcacaggtgtatgctgttcgttcagaaatgcgccgactgtttttgccgttgaccataaagtcttttcttctccgcctcttgtcacacggatctgctttgcagcatcatacacgacattcatgttgtctgccaatgctgtctgcttagacggggtaatccggtcttcatttctcgtctctatatgtaaatcttccagaagttccccaaccgtttttgcatgagtgcgtatttgctttttcttgccgttgatggaaacagaaactgattgttttgagagctcatgtgccccgtatgcagtcccggttccgcccagcagaataatagctgcaatcagaataaccttgcttttaccaagctttacggaaaacagttttttcattttttgtgtgatgaaaaacgcctccttctcctcggagagattatatagagtatctaaaatgctgtcaaccctcccatctcgaagatgaaaaaccttcagcgtatccctcattatgcaaaaacaaagcaaaaaaaggaagagagacatatcgacaacctatcttatgaggagaaggaagcttgtagaaccgttttacatatccactgaatcggacaagcttttacacgttatgacagcgcattctgtcagttcatgcggaaaagtctttttgcgttttcggttgtaattgaggcaatttcttcatatgtcagcccttttaattcagcgagctgttcagcaacatattttacgtagcttggctcatttcgtttgccgcggaaaggatgcggtgtcaggaaaggacagtccgtttcaatcagcaaacggtcattcggaatttcctttgctacttcttttggtttcttcgcatttttgaaggtaaccggtccgccgaatgaaatatagaaattcatatccatacactgccgtgcaacctccgtgctccccgtaaagcagtgcataatgccgccgacttcttccgctccctcttctttcaaaattgtgacaacatcttccgttgcatcacgattatgaatgataattggaaggttcacttctttggcgagagcgatttgtttccggaatacttctttctgaatgtcttttggtgatttatcccagtggtaatcaaggcccatctctccgatcgccacgactttttcgtgagaggacagttccttaatccatgataaatcttcctctgtcatgtcaattgcgtctaccggatgccagccgatcgcagcgtatataaagtcatattcctcaatcagctccatcgcacgcgtgatagtgggtttgtcgaatccgacaacgacaattcgttcaactttttcagcctttgcacgcgcaatgacttcctctaagtctgtgtcaaattgctcggcatttaagtgcgcatgtgtatcaaaaagcatcataaaaactcctttcttgttgaaaaacaaaaggtgttcgacggaatgttacacgtgaaacaccttttgcccctattatttaattcgagtgcctttcggtaatgactggtcgacagctacaactttgagaacgccgtccgattctcccgccagtatcattccttgagaaagctcgcctctcagttttaccggttttaaattcgttacacagatgatcttcattcccacaagctgatccggtgtgtaatgcttcgcgatacctgatacaacttggcgctgttcaaagcccagatcaatttgcaatttcagcagccgatctgcttttttcaccggttccgcggacaagacttctgcgacgcgaagttctgtatccataaattgatcaaacgtaatttcaggaagacgctctgcttcttgcggctcttccgccttttcttctttagcaggagcagttccttgcattttttgcttgatgtaagctacttcttcttcagcttcaagacgagggaaaagcggttccccttttttcactttcacattcttcaattggccgaatgtctgaatgctgtcccaagctttaagagactgatcctcaactccgagctgggaaaacattttttcaggcgtctgcgtcaagaaaggctgtagcaatacggccgaaatacgcaatgattcagctaaatgatacatgacagaacgtaattctttttctttttcctgatctttagcaagcacccacggagcagtttcatcaatatatttgttcgtacggctgattaattgccatagcgttgataaagctactgaaaactccatgttttccattgccttttcataagctttaaccgtttcaccggctacggaagaaagctctgaatcaaaatcggtcacatttccttcatatgaaccaatctcgccgtcaaaatatttttggatcattgcgactgtacgattcagaaggtttcctaagtcgttcgccaagtcataattaatccgttctacgaaaccttccggcgtaaagacaccgtctgaaccgaacggtacttcgcgaagcaggtaatagcgaagttcatccaagccgtagcgttcaattaacgttaccggatcaacgacatttccttttgatttcgacatttttccgtctttcatcaataaccagccatgcgcgaatacttgcttaggcagcgggagatcaagcgccatcagcataatcggccagtaaatggtatgaaaacggacaatttctttaccgacaaggtggacgtcagccggccagtactttttgtaaagctcatcattttccgtatcgtaaccgagcgctgtaatatagttgaacagtgcgtcaatccatacatacacgacatgcttcggatttcccggcacttttacgccccagtcgaacgtcgttctggaaacggccaaatcttcaagccccggtttaatgaagttgttaatcatttcatttttgcgtgattcaggctggatgaaagaaggattttcctcataaaacttcagcaggcggtctgcatatttgctcatgcggaagaagtatgactcctctttgattaattcgaccgggtggccgctgtcagggctttttccgccgacaacctcacccttctcatttcgttccacatccaccagctgtgtttccgtatagaatgtttcatcagggatgctgtaccagccctcatactcatccaggtaaatgtcaccattatcaagaagtttttgaaacactttctcgataatttctttgtgccggctttccgtcgtccggatgaaatcatcgtgagaaatgtcgagctgcttccatagcttttggatttcagcaactgcgcgatccacataagcttgaggcgtgatattctcttcctccgctttctgctggattttctgtccgtgctcatccgttccggttaagtagcgtacgtcaaatccttttaatcttttgtaacgcgccatcgcatcgcctgccacggtagtataagcatggccgatatgtaattttccgctcggataatatatcggggtcgtaatataaaaagtattattgtcttgcggcatgttgcaacctcccattcagaatgtcgaaaagctcacgcccaaaggacgagagcggttttatttgatatacaatattgatatttgtcctctatctatgataccatcttagcctttaagatcaaggatatatacgtactgcgcgtaaaagagtaaataaaattaaaaatttttattgaaattaaaaaaagtcttaacatgtcgaaatttgtcgtatataatctactaatataaaacatcttggttcgaaagtcttgatttaaaaggattttcagtaggataataggttcgaaaaagcagtcaaaaagcctgttatttcaggatttccaaggctttacttactataagaactaattcttacaaacaatagcaaacaaaaagattgacgattattggaaaccttgttatgctaggaatgtaaggaattttgtcgaataatgacgaagaaaaatataaactacaaataattatctctcgggaggagactgttaatgaaatctactggtatcgtacgtaaagttgatgaacttggacgcgtcgttatccctatcgaacttcgccgtacactgggcatcgcagaaaaagacgctcttgaaatttatgttgatgatgaaaaaatcatccttaaaaaatataaaccaaacatgacttgccaagtaactggtgaagtttctgatgataaccttaaacttgccggcggcaaattggtactcagcaaagaaggcgctgagcaaatcatctctgaaattcaaaaccagcttcaaaaccaaaaataagctatttcatacaaaaaccgttcttgttatgacacaagaacggttttttttatgattgaatgtgataagcgtcataaatctcgcgtttcggtacgtcccgatctaccgctgtttgttttatggcctgtttggaagaagatccttcatttatgtaatgctccacatgttctttctcagaaagctccgcccaccaaggcttttcctcttcatccggttcagcgccttgattgccttcgacaacgagacaaaactcaccgcggatttgatcttcatttgcccattcaagcacctcggcgatggttcctctgatgaattcctcatactttttcgttaattccctcgtgacggcgatggttcgattacccaaaacgtcatgcattgctgttaatgtttcttttaatctgtgcggcgcttcgtaaaatatcatcgtttcctgccgttttttcaggatttcgagttctttcttcttttcttttttttgtctgtttaagaatccgtagaagaaaaacggctgcggggtgatccctgatgcagtcagcgcggttaatgccgcatttgcacccggaagcggaacgacatatccgccgatttgggtgaaatctctcacaatctcagcccccgggtcggaaattgtcggcataccggcatcactgaccaatgccacattctttccgcttttcagccattcaatgattttatggccgctgctttctttattatgttcatgatagctgatgagagatgtttctatgtcataaacatggcacagctttttcgtctgtctcgtatcttcggcagctatgacatcggccgatttcagcgtctctactgcacgaaaggtcatgtcctccaaattgccgatcggtgtaggaacaaggtacagagttcccatttcagattttccgttaaaactcatctgacgtcttaacatatacagcctccttgctgcgtcgtttttcttctatatattgctcttttttctttcgggtcagctgcttaaaacggtattccgcctgcatcgcttcccgttttgtttcaaatgattccgcatggcataacgaaaccggccttctcgcccttgtatatttcgcgccctttccctcattgtgggttttcagccgtttttgcagatcatttgtataaccggcatacagactgttgtcattgcacagcagcacataaaagaaatgactatttgtctccatataaaatcgtgcggatctctttcgtatattcattttgttcattatatacaaagagcgggggaagaattttgagatcagggcggccgcctttaattccttcaaccaaaatggtattcgcttctttaccttgtttcggataaataaactgaacccgtttcggttctattcggtatgctttcattagttcaaagatttccagaagcctccccggccgatgaacgagagccgcttttcctccttgcttcagcagtttgctgctgacggaaatcacatcttcaagcgtgcaaaggatttcgtgccttgcgattctgagatgctcgttcaggttctgctccgcctctttcggtgttttaaaataaggcggattgcaggtgacaacatcatatttattatgtccgagtctttccggcatatttttcagatcatcatgaatgagactgatctgaccgcccagcccgttgtattccacgcttcgaagcgccatatcatacaagcgttcctgaatttcaactccggtgatatcggcttttgaccttgtgctgagcaaaagcggcacaatgccgttccccgtgcataaatcaacaatgttccccttttgaatcggaacgtatgcaaacttagacagcagcacggcatctaatgaaaaagcgaaaaccgtcggactctgtactattttcatatcctctgctaataagtaatccaatctttcatcatcacgtaatgaaaccataatcttattcctttcggcactctttgaaaaaggcttccgacatcagcggaagccttttccttattttttatttaagaaggacagacaaaaaaggcaatctcccttgcggacgctcccataatggacgttgcaaatatgaaagccttcttgatacagccgggccagattgtcgtacccttctcctatatcactctgctctgccttctgtgtttttgtttctttctgatcggctttgaacttctcaatttgctccgtcgtgtcatcaagccgcttacgcaaatgcttattttcaagctgaagatggtgattctcttcaatcatttcgccgatatgctgctttaagtcacccagctgacggtacagcgaaccgatttgttcctccaggtttatgacagtatcaaataactcttttttatccaaggttccacacctcgttaatctgtggtttgtgcggatacgacgccctcttccaagagctcttcccaagtatattctatcactttttcacgattcttcagttccacctgaagcacccgttccagaatattaagaccgacaacctttgcggggccgtttgccgtcgtaatcatttcgcctaaatccggcagctgttcttttgccgtctcatactcatcattttcatacttcaaacagcacatcaaacggccgcacagaccggaaatcttcgttgggttcaacgataaattttgatccttcgccattttgatggacaccggttcaaaatcaccgaggaacgtggagcagcaaagcattctcccgcatggtccgataccgccgagcattttcgcctcgtcccttaccccgatttgacgcaattcgattctcgttttaaagatagaagccaagtctttgaccaattccctgaaatcaacccgtccgtctgccgtaaagtaaaaaatgactttattgcggtcaaacgtaaattcaacatcaaccagcttcatatctaagccgtggtcagccacttttttctgacagacttcaaaagcggacagggcctcctgtttgttttcttctacaatgagaagatcgcgttcatcagcaacgcgaataacctttcgaagcggaagcacaacatcatgctcgtccacttgtttatttgcgatgacaacctgcccgtattctacacctcttacggtttcaacaatgacgcagctgtcttgttctatatcaaatccattcggatcaaaataataaattttccccgcttttttaaagcggacgcctattacgttgtacaagcttatccctcctgcaacgttaacaccaagtgctccattaatccctgcacattcacattggaatgaagccgtttttttgcttctaaaacagcgagaatttggttcgtaacgctttgttgtgtaaattgcagcgcatgctgttttattgattggaataagtcttgataaatcagtttatcttcatttccaatttggatggataatacatcacggtatatcaataagagcatatcaagacccatttcttgatgggttttttctttgaaaaagggcacccactgatcctgaatgaagaaaaaggcatgtcctttccgctgatgtaagacttcatacaattttatcactttcgctctggactctgcaaactcatcatttcgacttaattcgactgcttccgcaatattatttgtcatatttgctaagagccgggccatgtgagggctcacttcctgttcaatcagtctttcttctatggctttcggctgaagcggctggaacgggagaacctgacatctcgaaacgatggtatccagtattcggtggagctgctcagtaatcagaattgcgatggtgtcttgactcggctcctctaaaaacttcagcagactgtttgccgcatttgtggtcatttgatccgcatgggatataatgtacagctttttatgcgattccagccccgttttggaaaactcttcctgaagcgattggatctgagcctttttaatggataatccgtcgggctgaaccacatgcaggtcgggatggtttccggattcgatacgcttacagttccggcactctccgcaaggctcagtcccgtcttcaaggcaaaaaaagctttttgcgagaagcagtgcggcatccaatttgcccgtaccttttttgccttcaaacagatatgcgtgagaaagccttttcttttcaatgctgttatgcaaaagccgcatcactctgggctgctgcccggtcatttccttccatgatattgccattgtatcactctctatgtgtaaaggttaatcaataaaccttttatttctccgattcgatccagcaaatcaattgccggtttttcctgatctaacatttcttccgtcagctgaagcagtttttcatctatttctttcacaagccccagggtccggctgctgccgtacaagtcaaagcttttctccgtctcatgcgataatccgctgtctacggcctcttttacaaaacgttttaccaatcctttgaacttcgctaagtctttgaagtttctcgacttcgtcagccttttcccgaacgtttctatatccgttaagaacctgctcagctgatcaaatttcagcttgctgctttggctgtccattgaacttttaaacgttccggaaagctctgccgctttataagcaggctgctgctttttctcaataaatgtacgtaagtcagaatttattttcacgtcgtcaaatccttaaaattgatgaaattcatcgaccgggaggacaaagaccgtcgctccgccgacttccacttcgacgggatatggaacgtaggaatccgcattcccgcccatcggggataccggggcaatcatctgatcacgtttacagccattctctttaatgaggctgagcgctttatcgacacggatatcttccaccccgatcataaacgtcgtattgcctgatttaaggaatccgcctgttgtcgcaagcttcgtcaccctgaagttgtggtcggttaatactttcaaaagcctgttgctgtcctgatcctgcaccactgccactattaatttcattctctaggccccctttaggttggaaagaacattgtcgttacattcattatagcaacttatgagaaacaggtcacaactgaatttttttcaatgcttcatttatcacttgaagtgcgtcctgaatgacgagttccttctttttcgatgcgtcgattgtatggaatctttccggaaaacgctgcataaccttttggtatccttcccgtactttcgtgtgaaagtgcagagcctcaagatcgagacgattcttttctcttgaatcattcgacgtaatccgtttcaacccttcttcaggctcaatagaaaaatagatggtgacatcaggcatcgtatcgccgattgcaaactggttaatagaaagaacttcatcaatgccgagccctctcgcatagccttgataagccagcgaactgtcgatgaaacgatcacacagcacaatgcgcccttctttcaatgcaggctgcaccttttcggttaaatgctgtcttctcgccgcggcgtaaagcagcgcctccgtttttgcatccatcagtgtattgtttttatttaagatcacttctctgatctgttccgcaatgtcgatgccgcccggttctcttgtcgctgtcaccgggagcccctctgccgacagaatctctttcagttcctgaagcacagtcgttttccctgcaccttcaggaccttcaaatgttataaataaaccgctcatgatttctcctcttctatatagacaagtaattgttccccgtttaacaagccttgaatatgcgcgtccatgccgattaaacgggaaagcttctgtacgatctcttctgttatccgttcgccgtccatgatcagcggaattcccggcggataaggaataatgttccccgcatgcaagcgcccggccgccttatttatatctgcaggctcttttgtaaacttccgcatctcattttgcggatattcaagtgtcgaaatggacggaaatgtccaattcacggcatccggcaatttatcgggcggtgtattctccagtttctgctgtatgtttcttacggctgcctgttctatcatccgccggccgcctatcgacagtacgagcaatacttggtactcgtcagccagctcggcaacaatgccctcactctccaaaatgcgttgtaatgaatagccggaatgtccgagctttgaccgaagtattaattttaacgggtccgcccgcagcccatatccggaaggctcgattatttcaatagaagaaattgatgcgaaccttcgtttgattttctcaatgtgctccatatggacgggaagtgtccctttttcagcaatatcctgcacataagcacgcgccgtatctaaagatgccataatcgggtatgacgggctgctgctttgcaaactgcttacataataagttaatcgatctctgtcaattcgggtgctgtttaaatgaaagtaagatcccatcgtcatagccggaagcgttttgtgagccgattgaacaacggcgtccgcccccatagccaatgatgaaggcgggaaaggctgccctaacacaaagtgagctccatgagcctcatccaccagcacaggaacaccgtatgaatgggcttttttaactgccgcagtcaaatcggcggcgtgtccgtaataagtcggattggtcaaaacaagtcctttcgcgttcggatatgacgccagcgctttttcgatgactgaaagagatacatgtgccggcacatgcatattttcatcgatttccggcgccaaataaaccggcttggctccggccaatgccaccgcatggaaaacagacttgtgacaattacgctggatcagaatgggttcacccggttcacaaacagctaaaatcatcgccagattgccggcggtcgttccgttgacgagaaagaagctttcctgagagccgtacaatctgctcaccaaatcctgcgcttccttaatgacccctgtcgggtgatgcaagtcatcaagacccgtgatctcagtcatatcaatagataaaagagattgatatacagatttcgcttcatcaaaaaagacatctccattgtgatgtcccggaacatgaaaagaatacgtatttcggtgcgcatgcttcatcagcgctgtatataaaggtgtgtccatttttaaacaaatcctttgcctgtctttcttattatatcgtgcctgcgagccaacttaaagctaagactttttgccatctagccgttatcccggccggaactcatatcaagcagcttcttttttaaatcgccttccatgataacaagctcctcctcggcacgcctgcgtttcatcctgccttcttcttgaatagacatgatttcttcaagtgtgctgactaagctttcctgcacttttttgagggtgtctgcctcaacaagtccgcgctcattggctttggccgtctcgactgtgcttgttttcagaagttcggcgtttttcagcagcaattgatttgtcgtatccgccgccttcttctgcacatctgccgcactccgctgcctcataagcgtcagcgcgatggcgacttgattcttccataaaggaatagccgtaacaatggaggactgaattttctctgccagtgcctgattcgtgttttgaatcagacggatttgcggcgcactctgaagcgtaatctgcctgctcagcagcagatcatgcaccctcttatccagacggtcggcaaactggcgaagatcattcacttcctgtgcggccatttgattgtgttttcgtaattcggcttttcttgccacttcgggaataagctttgttttcagctcatctaattttaattcacccgctgctatatacatagttaaatcagaaaagtattgtttattttggacgtacagctgatctaaccatttattgtcactcaacagcacatttttagaatgttccagccttctgctgatacggtcaatctgcacacttgtcttttgatatttcgaaagcacttcctgcacagatccggatacccttttaaacagccgggcgaaaaaccctttgttctttacctgcagatcatcggggtttacctggtcaagcttcagcatcagatcagccaatatctgtcccatctctcctgcatcttttctttgcacgtgctctatcatcgtgtgggaaaattccagaagattcgcctgcgcctgtgaaccaaacagaacaatgctttgcatgtttccagggtccagtttttcagcgagctgaagtgccgcttctcttttttcttccggcagcgtatctgcaagctttagatgagtctggtcattttgggcgcccatactgtcgtcggaacggtctttggccatttccttcttcctttcttattttctcagtgaatgctttgccatatctaattcaaagtgcaggtcgtcgatgtcctccttcatcagttcatgaagatcttcttccagccttctggaaagctccgccagagtcatcctcgtctcactcaaggacattgataaatctttattttttcgcggctgtgatgagagcaaagcatacttttccgtcagttccacaacagaatcaagcgtttgataatagaaacgctctgcctgataaaaacgcttcggctcctgctttgtgagcagatatattcgtcgggttatccgcagtatctctgcattctgcttcagcatttgtatacttttagagcggaaaagcgccctgcgtaatcggatgattttaccctttgcttcctcgagattttccttgatataagcatattcttttcttgtcagccggtgtttttttaaaaagagacgcttcgcattccacaagccggacgcactgactgcggctccgccggccgccccgtataaaagcgaatacagaaaaggctggtgccctatcgtaaagaaggttatccccgctaatacaaaaactgtgctgccgcaaaatgtccatttcatatattgaataaacggtttcatacttgatcgactcctatttattcacttttatcagtattatctattacattccatgtctaaacaagttcctcttcttatcgtatcagttcttttataaaaagtgaaaaaactcctctgatttcaggcaaaaaaaagacccttttcagggttaagaatataacgtcggtgtatgaaggcttttcaatttacgaacgaaaaattcataattcggatcagaggtcggagtggaaactactttcttctcacactctaaacatataaatttcgtataaatatggattcccctgcttttcttggtttcacacacaatacatgtttcttcatggccggacgtttcattcattttgcccacctccgtatgaatagccttcccttaaactgttgattgtatacacaatttggatctttttgaagtttgcaattagtatatgggcgttcccgtatttcggtgtttgtttcgtttttattcaaaaacaaaaaaggcagctcatgatgagctgcctttaccgtaatgatagcttggcggcgtcctactctcacagggggaaacccccgactaccatcggcgctgaagagcttaacttccgtgttcggcatgggaacgggtgtgacctcttcgctatcgccaccaaaccattgagagtgttctctcaaaactagataacagtaagcatacattcaaattggttaagtcctcgatcgattagtatctgtcagctccatgtgtcgccacacttccacctcagacctatcaacctgatcatctttcagggatcttacttccttgcggaatgggaaatctcatcttgaggggggcttcatgcttagatgctttcagcacttatcccgtccgcacatagctacccagcgatgcccttggcagaacaactggtacaccagcggtgcgtccatcccggtcctctcgtactaaggacagctcctctcaaatttcctgcgcccgcgacggatagggaccgaactgtctcacgacgttctgaacccagctcgcgtaccgctttaatgggcgaacagcccaacccttgggaccgactacagccccaggatgcgatgagccgacatcgaggtgccaaacctccccgtcgatgtggactcttgggggagataagcctgttatccccggggtagcttttatccgttgagcgatggcccttccatgcggaaccaccggatcactaagcccgactttcgtccctgctcgacttgtaggtctcgcagtcaagctcccttgtgcctttacactctgcgaatgatttccaaccattctgagggaacctttgggcgcctccgttaccttttaggaggcgaccgccccagtcaaactgcccacctgacactgtctccccgcccgataagggcggcgggttagaaggtcaatacagccagggtagtatcccaccgatgcctccaccgaagctggcgctccggtttccaaggctcctacctatcctgtacaagctgtaccaacattcaatatcaggctgcagtaaagctccacggggtctttccgtcctgtcgcgggtaacctgcatcttcacaggtactataatttcaccgagtctctcgttgagacagtgcccagatcgttgcgcctttcgtgcgggtcggaacttacccgacaaggaatttcgctaccttaggaccgttatagttacggccgccgtttactggggcttcaattcgcaccttcgcttacgctaagcgctcctcttaaccttccagcaccgggcaggcgtcagcccctatacttcgccttacggcttcgcagagacctgtgtttttgctaaacagtcgcctgggcctattcactgcggctctctcgggcttgcaccctaacagagcaccccttctcccgaagttacggggtcattttgccgagttccttaacgagagttctctcgatcaccttaggattctctcctcgcctacctgtgtcggtttgcggtacgggcacctctcacctcgctagaggcttttcttggcagtgtggaatcaggaacttcgctactataattcgctcgccatcacagctcagccttcacgggaaacggatttgcctatttcccagcctaactgcttggacgcggatatccaataccgcgcttaccctatcctcctgcgtccccccattgctcaaatggtgaggaggtggtacaggaatatcaacctgttatccatcgcctacgcctttcggcctcggcttaggtcccgactaaccctgagcggacgagccttcctcaggaaaccttaggcattcggtggaggggattctcacccctctttcgctactcataccggcattctcacttctaagcgctccacaagtccttccggtcttgcttcacagcccttagaacgctctcctaccactgttcgaagaacagtccgcagcttcggtgatacgtttagccccggtacattttcggcgcagagtcactcgaccagtgagctattacgcactctttaaatggtggctgcttctaagccaacatcctggttgtctaagcaactccacatccttttccacttaacgtatactttgggaccttagctggcggtctgggctgtttccctttcgactacggatcttatcactcgcagtctgactcccaaggataagtcatcggcattcggagtttgactgaattcggtaacccggtaggggcccctagtccaatcagtgctctacctccgagactcttaccttgaggctagccctaaagctatttcggagagaaccagctatctccaggttcgattggcatttcacccctacccacacctcatccccgcacttttcaacgtgcgtgggttcgggcctccattcagtgttacctgaacttcaccctggacatgggtagatcacctggtttcgggtctacgaccacgtactcaattcgccctattcagactcgctttcgctgcggctccgcatcttctgcttaaccttgcacgggatcgtaactcgccggttcattctacaaaaggcacgccatcacccgttaacgggctctgactacttgtaggcacacggtttcaggatctctttcactccccttccggggtgcttttcacctttccctcacggtactggttcactatcggtcactagggagtatttagccttgggagatggtcctcccggattccgacggaatttcacgtgttccgccgtactcaggatccactcaggagagaacgaagttttgactacagggctgttacctcctatggcgggcctttccagacctcttcatctacctcgttcctttgtaactccgtacagagtgtcctacaaccccaagaggcaagcctcttggtttgggctggtcccgtttcgctcgccgctactcagggaatcgcatttgctttctcttcctccgggtacttagatgtttcagttccccgggtctgccttctcatatcctatgtattcagatatggataccactccattacgagtggtgggtttccccattcggaaatctccggatcaaagcttgcttacagctccccgaagcatatcggtgttcgtcccgtccttcatcggctcctagtgccaaggcatccaccgtgcgccctttctaacttaaccgttaaaaagaatcactacgtgatatcttgcattactaattgaatgtgaattacttctgttatctagttttcaaagaacacgttggtggagcctagcgggatcgaaccgctgacctcctgcgtgcaaagcaggcgctctcccagctgagctaaggccccgtattgggtaaagatggtgggcctgagtggactcgaaccaccgacctcacgcttatcaggcgtgcgctctaaccagctgagctacaggcccatctaccatatgaaagaatcaaaattccttcaaaactaaacaagacagggaacgttctgtttataagacccaaggtcttatattccgttaaaatccttagaaaggaggtgatccagccgcaccttccgatacggctaccttgttacgacttcaccccaatcatctgtcccaccttcggcggctggctccataaaggttacctcaccgacttcgggtgttacaaactctcgtggtgtgacgggcggtgtgtacaaggcccgggaacgtattcaccgcggcatgctgatccgcgattactagcgattccagcttcacgcagtcgagttgcagactgcgatccgaactgagaacagatttgtgggattggcttaacctcgcggtttcgctgccctttgttctgtccattgtagcacgtgtgtagcccaggtcataaggggcatgatgatttgacgtcatccccaccttcctccggtttgtcaccggcagtcaccttagagtgcccaactgaatgctggcaactaagatcaagggttgcgctcgttgcgggacttaacccaacatctcacgacacgagctgacgacaaccatgcaccacctgtcactctgcccccgaaggggacgtcctatctctaggattgtcagaggatgtcaagacctggtaaggttcttcgcgttgcttcgaattaaaccacatgctccaccgcttgtgcgggcccccgtcaattcctttgagtttcagtcttgcgaccgtactccccaggcggagtgcttaatgcgttagctgcagcactaaggggcggaaaccccctaacacttagcactcatcgtttacggcgtggactaccagggtatctaatcctgttcgctccccacgctttcgctcctcagcgtcagttacagaccagagagtcgccttcgccactggtgttcctccacatctctacgcatttcaccgctacacgtggaattccactctcctcttctgcactcaagttccccagtttccaatgaccctccccggttgagccgggggctttcacatcagacttaagaaaccgcctgcgagccctttacgcccaataattccggacaacgcttgccacctacgtattaccgcggctgctggcacgtagttagccgtggctttctggttaggtaccgtcaaggtgccgccctatttgaacggcacttgttcttccctaacaacagagctttacgatccgaaaaccttcatcactcacgcggcgttgctccgtcagactttcgtccattgcggaagattccctactgctgcctcccgtaggagtctgggccgtgtctcagtcccagtgtggccgatcaccctctcaggtcggctacgcatcgtcgccttggtgagccgttacctcaccaactagctaatgcgccgcgggtccatctgtaagtggtagccgaagccaccttttatgtctgaaccatgcggttcagacaaccatccggtattagccccggtttcccggagttatcccagccttacaggcaggttacccacgtgttactcacccgtccgccgctaacatcagggagcaagctcccatctgtccgctcgacttgcatgtattaggcacgccgccagcgttcgtcctgagccaggatcaaactctccgataaagtgtttgactgactacgcacatcgctgtgcgatttatttaaaactttgaattaacaggtacgttttgtcttgtttagttttcaaagaactttgtccatcgctcttgaagcgacttaattattataacatctcagtgtcattgtcgtcaataactttttaaaatttctttttcaagaattcgtttcgtcatcagcgacgtatattagaataccacccttgatccaacatgtcaacaataatcgacaaattaaatgatgaagcgtttaatgactatcaaagccgcgataccgggaatcccaagaattccgctgatgcccgttgtaatcaggttaacagggatatgaatacccagactgcccccgaacaagttcacacccaccaacagaatcgcgccggcaataaacttaatggcagtcacaccaatccaccttaacggttttgaagatactccccataaaaaaagcaaagcaaccagaccgacaatcaaaccgataatgaaaaaaggctccatgaatcttccccctcgcttgtttagtacaagcttatgagaagattccggagaatagacctcttacttccatctgctcattttcaaattccgctgcttcgcttctttcaaataaaaaaagtacttagattcagcgactttcagctcaaacaacacctcagcggagggctctagacttttctcgaccagactcttctgtctgttccattcttctttttgtttaaagagctgttctatcagcttctcgtcaaactcttttcttaatgtatttctgcgaagaaaacccatgccttgccttttcctcccttacaattcacgtcttccttcaagagcttttgaaagagtgacctcatcagcatattccaaatcaccgccgacgggcagaccgtgggcaatacgggagagcttgatgcctgagggctttaacagccttgatatatacatcgctgttgcttccccttcaatattagggttggttgcgagaataacttctgtcacttgatcatcctgaagacgtttcagcagctccggaatcttaatatcctccggaccgatgccgtccattggtgaaatcgcgccgtgaagaacatgatactggccgttatattccttcattttctccatcgcgatcacatccttagggtcctgcacgacacaaataacagacttatctcttcttgtgtcctcacatatataacaagggtcctgatctgtaatatgtccgcaaatcgagcaatatgtcagattccgcttcgcattgacaagcgccttagcaaaatccaatactgtgtcttctttcatacctagaacaaaaaaagccagacgaaccgctgttttcggtccgatccctggcaatttcataaagctgtcaatcagctttgatattggttcaggatactgcatgtttatttatccccctagaataaacccggtatgttcattccttttgtaaattgtcccattgtctcattcgtcatgtcatccacttttttgagggcgtcgtttgtcgcagcaagaaccaggtcctgaagcatttcgatatcttccggatcaacaacttcttctttaatggcaacgtctacaacttctttttggccgttgacttttacagtcaccataccgccgcccgcagtgccttcaagcactttttcagcaagttcctcctgagccttcgccatatccttttgcattttttgcatttgtttcatcattttttgcatgtttcccattccgccacgcatattcaatcactctctttcatcttattagtcttttatttcgattaaatccgctccgacaagttttttcgcctctgcaatcagcggatcttcttcagccggttcgtttgatccttcactttcctgctggtgatcatttaaaaattcttctcttattttaccccattgtgcttccggaacgccaatcaaatccattcttttcccgagcattgattcgagaatctgttcaagattcgtacggactccgttattgtcttctgcaaccattttacaatggatttcgtatttaaatttaagcacaaatgccttttgagcagcggccaccggttcactgtcattcaaaagagccgcatgagacaccttattctgctgtttcaggtgtgccagcagcttgccccagctgcttttaagctgttcaagatcaggtcttgtggcttccttcaatatctcatgaattcttccgaccggggctttataatggctttttccgcctttttgaggacgcggagcttctttcggagcgctttccatctgaaccttcacaccggaggttttcagcctttctacttcctgctcaagctgctggatcttattcatcagcatgccgacctcagggatgtctccggcggattgctgtgccgtttggcatattttcacgacagccacttcaaaaaagattcttgggtggttcgtccacttcatttcctgatggcttttattcaggatatcaatcatctcatataaagcgggggccggtatgtcaccgctcagattccgaaacgtttcatcgaccttcaccttctccaggactccttctaaaccgggagcggcctggtacaagagcatatccctgaaatagaaaatcatatcttcaatcagtttggccgcatctttcccctgctggagcaattcattcagtgtttccaatgcctcggaaacctgtttgcggtgaagagcagatgccagttttccaatatagtgctgagaaacggctccggtaatgagcaaagcgtcatccaccgacagctcctcgccgctgaatgatacagcttgatcgagcaggctcagcgcgtccctcattcctccgtccgcagcactcgctatgatatcaagggctccttcttccaccttcagctgctctgcatcgacgattgtcttcattcgtccgacaattgctttggatgtaatccgtttgaagtcaaaacgctgacatctggagataatggttaaaggaatcttatgaggctcagtcgtagctaatatgaaaatgcaatgtgccggcggttcttccagcgttttcagaagcgcattgaatgcgccgatagagagcatatgcacctcatctataatatataccttgtaagtaacggccgacggggcaaattttactttgtcacggatgtcgcggatttcgtctacgccgttattcgacgccgcatctatttcaatcacatctgatatagagccatttgtgatccccttgcatgccgcgcactcattgcacggttcttctacaggggcgtgctcacagttgactgctttcgcaaatattttagctgcactggtttttcccgttccccgcggtccagaaaacagatatgcatgagaaaatttcttttgcaaaagggcattttgcagcgttttcgtaatgtgttcctgtccgaccacatcttcaaactgctgaggcctaaatactcgatataaagcttggtaacccacaggatgcgccctcctctgttattcatcatgtttattatacatgaacgtgcttttaacgccaaaacccgtttttcatatacgaaaaaactcacctgccataacaggtgagtctgaaatttgatgattgatttaccgtgcaccttctgtcgattcgctaccctaagcgttacttaagcagttagctcagcccaggcaaccctgcggcacatgagaggtttcacttaatgctgcttccttccggacctgacatggttcatgaattcccattgcgcaggacccagacgtcaacgccacttacttaaggcagaccttacagtaaacgaacctcgagaagggattcggccccgctagagcggattgcgggtacagggcaccgctacctccccgcttagcacggcaaaataaatatcaaattttgatatgcgcaccattcatgatgcacacataagtatatctgcttcaggcagaaaatgcaaccgtactactcagacaactttttcctcatgtctttcttttgccggcgcagctttctgaaaaaagcgctgagcatttctccgcactcttctccgagcacgccgctcaccacttccgcttggtggttgaaccgctcttcctgcaagaggttcatcagcgttcctgtacagccccccttgggatcaaatgcgccgaatacgaccttatcgactctcgaaagcacgacggctcccgcgcacatcggacacggctccaaagtgacatagagaacggcatcctcaagtctccatgtccccagcttacggcacgcttcgtctatcgccagcatttcggcgtgggcaagcgacctctgttcagtctcccgcagattatgcgcccgcgccacgatctcatcgtgcagaacaagaactgctccgatcggcacttcacctttctcttcggctttcttcgcttcttttatggcttctctcatataatattcatcattcatcggttcgagctctcttcttaagttttttcatgtctcataaaggttaaaataggaataccccagcagaaaggagttgccggtattgtctgaacctaacaacacagcccttctgattgtcgatatgatcaacaattttcaatttgatatgggcgaacgtcttgctgaaaaaaccaaacaaattgtcccccgtattttatcattaaagaagcatgcaaaacaaagcaactggccgattatttatattaatgatcattacgggctctggaaggctgatattgatgccatcagggaggaatgcagcaacgacagaagcgcctccattataaaagatatttcgcctcagccggatgattattttctcattaaaccgaagcattccgctttttacgaaacggcgcttcacacccttctgaccgaattacaagtgaaccgattaatcatcacggggattgccgggaacatttgtgtgctgttcacggccaacgacgcttatatgagagaatacagcattgccattccgaaagactgcaccgcttccaataacgacgaagacaatgatttcgctttgaccatgatggagaatgttctcttcgcagaaataaccacggaaaaacaaattaccggcgaaaaataaacatgatcagcctccttttttcatatatttgatagcggatatgaaaggaggcgtttttcattcagatctatatagtgaaacggggcgacacgctttccgctattgcggcgcgctaccggacagccgcaaatgtcattgcggaagcaaataaactgcctaatcccaatacattggttgtcggacaaacccttgtcatcccgattgagggtcaatattacgaagtaaaacaaggtgatactctcgcgtcaatcgccggccgttttcatatatcggccgcggagcttgcgagggtgaacggaattcagcccggcaccacattgagagtcggaacccgcctttacattccgcagcaggcgaataagcccgatatcgaatcaaacgcatatatagaaccgcggggaacgagcgtaagcgctaatcttcagcaggcggcaagggaggcctctccttatttaacatacctcggcgcattcagttttcaagtgcagcggaacgggactttaaaggaaccgcctctgaccaatttaaaaagcatcagtgacaggcacaacaccacactgatgatgatcatcaccaaccttgaaaatgacgcattcagcgatgaactcgggcggctcatcttgaacgacaatacagtgaaaacaaaactctttcaggaaatcgtctccacggctaaaaagtacggctttcgcgatattcactttgatttcgaatatttacgtccacaggacagggaagcctacaatcgttttttacgtgaagcgagaacgatttttcatcgggaaggctggaagatttcaacggcgcttgctccgaaaacgagcgcgactcaggccggcaaatggtacgaagctcatgactatagggcacatggagaaatcgtcgatttcgtcgtgattatgacatatgagtgggggtacagcggaggcccggctgaggccgtatcacctatcggccctgtaagaaatgtcattgagtacgcgctgacggaaatgccttcttcaaaaatcgtcatgggccagaatatgtacggctatgattggacactgcctttcaaacagggaacgacagcgaaagccgtcagtcctcagcaggcaatcgctctggcagcacgctataaagtcgacattcaatatgacgaaaccgcccaggctcccttcttccgatacacggatgcaaatcagagacggcatgaagtatggtttgaagacgcacgatccattcaagcgaaattcaatttaattaaagaacttcatttaagaggaatcagctattggaaactcggcctttctttcccgcaaaactggcttttgctcggcgatcaatttcatattgtaaaagagacgtttcgttaattgggagcgtcttttttcatgggcttttctgtgagtgtgatacaatataaaggccggcagctgacggatgtttgcagaattaaggaggattttcaatgaacagagccccttttatcgcggtagaaggtcctatcggggcaggaaaaacgacactcgctacgatgctttctgaagagctcggttttcctatgattaatgagattgtggaagacaacccttatctcgataagttttatgacaatatcgaggagtggagtttccagcttgaaatgttttttctatgtcacaggtataaacagcttgaagacaccgatcgagattatttaaaacaaggacagcccgttttgtccgattatcatatttataaaaatgttattttcgcagagcgtacattgcacggccaaaagcttgagaagtataagcagatctatcatctgctcactcacgacctgccgaagccgaatatcattgtatacataaaggcaagcctgccgacattgcttcaacgcattgaaaaacgcgggcgcccgtttgagaaaaatatcgaacatcaatatctggaacatctcattgcagattacgacacagccatcagacagcttcaggaagaagatccggatatatctgtactgaccattgacggtgatactgaagactttgttttgaataagacagactatgaaagaattgcccgtcaggtaaaggagcttattaaatgaaagacattcatattccaaacaacgccattataacagtagcgggaacggtaggagtcggaaaatcgactttgaccaaagctttagcaaaacggctcgggtttcatacctcacttgaggaagtggatgaaaacccttatttagagaagttttatcacgattttgaacgctggagcttccatttgcaaatttattttctggctgagcggttcaaagagcaaaaaaacatgtttgaatcaggcggcggattcgtgcaggaccgttcgatttatgaagatacaggcatattcgcaaaaatgcatgccgataaaggaaccatgtcgctgacagattacacaacatacacaagcctatttgaggcgatggtcatgacgccgtatttcccgcatcctgatgttttgatctacttagaaggcgaccttgaatacattataagccggattgaaaagcggggccgcgagatggagctgcagacaaaccgctcttattgggaagagatgtatacacggtacgaagactggatcagcggttttaacgcctgccctgtactgaaagtacgcattgaagattatgaccttgaagctgatgaacagtcactggaacctttgatcgaaaaaatcagtcacgtgatcagcgaaaacagaaacaaataaaaatagcaaagcgattttccccgaacagagaaaatcgctttttttgcatataaaaaatccgctgcatcagatgcagcggacaaaacaatctccaatatatgctcgagtttcattaggtttaaaatcaatatggcggaggaagagggattcgaacccccgcgggctttgacacccctgtcggttttcaagaccgatcccttcagccagacttgggtattcctccgtatcgacatttaataatataccacatgacccaaatttcagtcaagcgctttttcatattttttatttcatttcttaaacagcttttccgtcagctttactatcatacaaaagtcttgcgtccaattcaacctcagtatgccatacgggcaggaaaacaaagtaaaaatcaagaatagattcaaacagataacctgctcataaaggtggagaacataatgaaaatcatcatcgcacccgattctttcaaagaaagcatgacatcaaaagaagccgctgacagcatagaaaaaggattcaaagcggtcttccctgacgcggaatataccaagatacccgcggccgacggcggagaaggaaccgttcaggctttgacggatgccactggcggaagcatcatcaaaaaaactgtgaccggtccgctgggaacgccggtaaacgccgcatatggacttctgggagacggacgcacggcagtcattgaaatggcggaagcatcgggactccatctcgttccccgccatctcagagatccgttgaacacaacgacaagaggaacgggtgaactgatagcggatgcagcctcccgcggggcgagtgagatcatcatcgggcttggcgggagtgcaaccaatgacggcggaacaggaatggcgagcgcgctcggtgtgcgtttcttaaatgaggaaggtcaggagatacatgacggaggaggcgctctgcacaccctagcttctattgatataagcgggctctcccctgatctgaaacatatccgttttcgtgccgcatgtgatgtcgaaaatcccctgaccggtgaaaacggcgcgtcatatgtcttcggcccgcaaaaaggggcgtccgagaagactaaagttgtattggatcgcaatttataccatttcgctgacgtattgagacgtcagcacgatatcgaagcggataccgtaaaaggcgcgggcgccgcaggggggctgggcgctggactgatcgctttcttacaggcagaaattcaaagcgggattgacgttgtattagatacactgtccttctcagatcagataagagatgctgaccttgtcattaccggagagggccagattgacggacaaacgatattcggcaaaacccccgccgggatcgccgcacgcgcagccgctcaagaaattcccgttatcgcattggcgggctccttaggcaaaaattttgagcatgtttacagcgcaggaataacagctgtattttctatcgtgcccggcgctgtaagtcttgaagacgccttagcatccggccgttttaacctggaaagtacagcccggaatgccgccgctctataccgggcagcaaaaaaggcgcgcctctagggcgcacctttttatggtttgatgacttctttatttcccatataaggacgaagcactttaggaatgatgacacttccgtcttcctgctggtagttttccaagatggcagctacagttctgccgactgcaagacctgaaccgtttaatgtatgcacatgctcaggcttgcctttcgcttcgcgtctgaaacgaatgttcgcacgtcttgcctggaaggcctcaaagttgctgcaagaagaaatttcacggtatgtgtcttggcttggaatccatacctcaatatcgtactttttcgcagctgtaaagccgagatcaccggtacacatgctcatgacgcgatacggcagttcaagcagctgaagcacccgctcagcttgatttgtcagtttttcaagctcctcataagaatcttccggcttcacgaactttacaagctcaaccttgttgaactgatgctgacggatcaaaccgcgtgtatcacggccggcggatcccgcttctgaacggaagcaggcgctgaacgcggcataattgatcggcaggttctcaccggataagatttcatcgcggtgcatatttgtaatcggcacttccgccgtcggaattaagaaataatcctcttctctgattttaaaagcatcctcttcaaatttaggaagctgtcccgtacctgtcatgctcgtacggtttaccatataaggaggaatgacttccgtgtaatcatattcatccacgtgaagatccagcataaagttgtagagcgcgcgttcgaggcgggcgcctaatcctttataaaacacaaaccggctgcctgttacttttgaagcgcgttcgaaatcaagaatgtttaagcggtctgcgatatcccaatgcggtttcggctcatatgaaaatgccggcgcctctccccacttgcgaatttcaatgttatcatcttccgtttctccgacgggaactgaatcgtgcgggatgttcggaatagacagaaggatggtttcgagcgtcgtttcgacagtacgaagctcttcatcaagcttcttaatttcttcgcctacttcacgcatctctttaataatatgatcagcgtcttttttctcccgtttcaaaacggcgacctgctgagacacctcattgcgttttcccttcagttcttctactttaccgataagctctcttctcttttcatccagctcttcaaacttgtcaaagtcagataagtcttcgccttttggaatgagcttcgcttttacctcttgaaaattggctctcagcaccttcgtatcaatcatgcctaacaactcctatctgtttttatcgaaaataaaaaagagccctcatcccctaaaagggacgagagctctcgcgttgccaccctgattgaaaacaagctcacacttgctttccgctttaacacataacggttttcccgtaaatgcctacttgttttcagcatttcgctcaaggacggattcggacagcatctttcaccgattcgcaccacccatcggctctctttgaaagaggggcttcctactgcttcctgtcaacgcttttcgatctttatttgtgattataatgtactataagtatcagcggttttcaactgttttatacagctgtttcctgcttatgcttttccgccatcttcacaaacagctctgtcacccggtgatcatccgtcagttcaggatggaacgagcagccgaggaaatttccctgctttgcagccacgatgcgtccgttatgctcacaaagcacttcaacatcttctccggcttttaaaatatgcggtgcgcgaataaatacacccgtaaacggctcatcaaggcctttaatcgtcagatcagcttcaaagctgtcgacctgacggccaaaggaattacgctcgacaactacgttcaacagccctaaatgagcgttatccgttcccgctatctctttggctaagataatcagaccggcgcatgtgccgaacatcggcttgccttgagcggcaaactcgcgaagcggctccataaaatgatacgtatccattaaacgccgcatcgtcgtgctttccccgcccggcaggattaagccgtcgatgtcattcagctgttcaggacgcttaatgacgacaccttttgaaccacatgcttcaattgaacgaatatgttctcttactgctccttgaagtccaagtacaccaattgttaacatgcttacagctctcctatggttttaccagccgcgttcttgcatacgctgttccggcaatagatttgagatttcgatgcctttcattgctgtgcctaattctttagaaagctcagcgatcagtttgtagtctgtataatgagtcgttgcttcaacaattgctttggcgaatttagcagggttgtctgatttgaaaatacctgaaccgacaaatacgccgtcagcgccaagctgcatcatcaatgccgcgtcagcaggcgtcgctactccgccggcagcaaagttcactacaggcagtttgccgtcacgtttgatctgaagaagcagttcataaggagcgccgaggtttttagcttcagtcatcagctcatcatcgctcatcgcaacaactttgcgcacttgcgcgtttacttttctcatatggcggacagcttccacaatgtttcctgttcccggttcgccttttgtacgaagcatggaagctccttcggcgatacggcgcgttgcttcgccgagatcacggcagccgcatacgaacgggactgtatattcatttttatttaaatgaaattcttcgtcagccggagtcagaacttcactttcatcgatgtaatctactcccattgcttcaaggacacgcgcttcaacgatatgtccgatacgcgcttttgccattacgggaatggatacagcattcattacttcttcaacgattgtcggatcagccatgcgggcaacaccgccggcagcgcgaatatcagccggaacgcgttctaacgccattacggcaacagctcccgcctcttccgcaatcttcgcttgttcagcatttactacgtccatgatgacgccgcctttttgcatttccgccatgccgcgttttacacgatcagtacctgtttgagccattatttggtccccctagtcaatgtatagttagataatgtctatctcttattgtatcccagaaatacaatatttcatatgggtattcttattttacagcgagatgaataagatagatatcatttttttactaataatttggttttttcagtatattaagcaaaagagccctaactttcatcagagctctttcttatttcttaaaaccagcctgttaccgtgtcaacggcgctgttccagataccggagaaaaatccgccgatgccgcgcatcatctgaacaaaccagtttgctttatctacatcatttttcgttacaagattcacgctgaactctttggatttgaggaagccatagtctttgtcactgcctttgtatgtaactgtcagcgttccgactttcgttccctttttcacaggagccgtgatttcttttttatctatagtcccttcggctttatagttcttttcatccccgcttttcacaggaatagaaagcgccttgtcagtaacaatatcgacttgcttgtctttccctttttcaacgtcaaccgttttgtgcccttttacttgagagccttcagggtaaagatctttcattgagaaattgctgttaaatgcgtaatcgagcatttttttcgtttcatcaaaacgtccggtatgcaggttgccttttgcgtttaatacaacggtgatgacccgcattccgttccgctgtgctgtgcttgtaaaacaagatcccgcagaatcagtagaacccgtttttaagccgtcaacgccagggtattcagaaacaagaccttttaacatgaagttccagttcggcatgtccatttcatcatcagtgccggctctgaatttcgttttagcgatgcttgttgttttgagaacttccggataatcagtgatcaggcggtctgcaagaagcgccatgtctttagcagaaacttcactctcttctttaacgccttctccttgcggctgtttgccgtgaagatcttcattcacaagccctgtggcatttttaaaatcatagtttgtcatgcctaattctttggctttcgcattcatttcagcgacaaatttcgtttcagttccggcaagaatttcggcaactgcaatcgcggctccgttagcagagtaaatcgccatggcctgatacagttctttaaccgtgtatttgccgtcttttcgaagggggacgtttgataaactgttgtcttgagaaatttcatagacataatcatcaggagtatacgtttgatcccatttcacttttccttctttaatggcttccagaagcagatattcagtcatcatttttgtcatgctggcaatcggcagtcttttgtctgcatttttactgtataaaatttttcccgatgaagcctcaatcattatcgcagctgatgcgttgacatcaatcgggtcattgccggctgcctccgctttagacatcggaacaaagcaagttgcggccagtgccagtaccactaatgacaccaacagctgtttccatttcgtgatgttcaatcttacgacctccgtcattcattttaaatctataattaagccgttaaggacatattcaaattcaaaacacaacagtataaattttatcacactcgatataaaaaaaatagacagagtcagcgaccctgtcaaatgttttttatttgtaacaattatgagattgtgtagtttggtgattctttcgtaatttggacatcatgcggatgactttcgcgaagaccggcacctgtcatacggatgaattgagcctcttctcttaaagcgcgcaagtcttttgaaccgcaatatcccatacctgaacgaagaccgccgacaagctgatacactgtttcttctacaggacctttgtacggagtccgtccttcgataccttcagggacgaatttcttattttcttcttggaaatatcggtctttactgcctttttccatggcagcaacagaacccataccgcgatacactttaaatcttctgccctgatagatttcagtctctcccgggctttctgaagtaccggcaagcaggcttccgagcattacggcatgtccgcctgaagccaacgctttcgtaatatctccggagaatttaataccgccgtctgcgataattgtcgcgccgtgttttctcgcttcagtggcacaatcataaatggcagtgatctgcggtacgcctacacctgcaacgacgcgtgtcgtacagatagaaccaggcccgattcccactttgacaatatttgctccggcttcaatcagagcttttgtcgcttcagccgttgcaacatttcctgcgataatgttcagttcaggatatgtttcacggattttcgcaactgtgttcagtacgcctctggaatgtccgtgagccgtatcaaccacgataacgtcgacattcgcttcaacaagcttgctgacgcgtgtcattgtatcgcctgtcacgcctaccgcagcgccgacaataaggcgtccgtgttcatctttagatgaattagggaattcgataaccttttcaatatctttgatcgtgataagaccttttaatttgttttggtcatccactaacggaagtttttcaattttatgtttctgtaagattttttctgcttcgtctaatgtggttcccacaggagccgtaaccagctcttcttttgtcatgacatcactgattttcattgaataatcagagataaagcgaagatcacggtttgtaatgataccgacaagcttttgatcgtctttattatctacgatcggaacaccggaaattctgtatttccccatcaaatgctccgcatcgaatacttgatgatcaggtgttaaaaagaagggatttgtaataacgccccgttcagaacgtttgactttgtcaacatgttcagcctgctgttcgatggacatgtttttatggataatgcccaagccgccctgtctggccatcgcaatcgccattgctgattctgttactgtatccattcccgcactgatgacaggaatattaagctttaacgtttttgtcagttcaacagataaatccacatcacgcggaagtacgtctgattgagccggtacgagcagtacatcatcgaacgttaagccttcttttgaaaatttactttcccacattagtaaatccccctcttttcggcaaaatattatatgtagattatcaactagaaaacagcatgtcaaggaagcgaaaaagagttgaaatatttagataaaggaaagggtttaaaaatacatatgagagatcatgagtggaaagagttatcattattttattccgtagaatcttcccagaaatttctaaacaaagtctatacagaaagcggcatggaagaaccaaaacgatatgcgtttaagaacagtgagcgcttcatattctttatcaaacacgccgagtccttttataagcaggcatctctttctcctttagaaattaagcctattctgttgttttacgggatgtcacaattgctgaaagcctgccttctgaccacagatccaagctacccaagccacgcttcagtactcgcgcatggcgtgactgcccggaaacgcaaaaagcaaaattactcctttagggatgatgaagtgaaggtgcagcgcaatggcttatgtattcatgtaatgaagcacttattcgggatagctggtcttgaggaagaacggtacacaatgaagaaattactgacagccatacctgaattgcatactgtcttttacttccaagagaaaaagaattggatgacccaagtagagctgaacgatgaccttatttcagtgcctgagcatgcggtgattcattacaatatgtctgattcccgctttgctgaatatatcagccatcatttgaagtggtcttttctgaggaaagaccataaccacttgttttttgaggctgacccgatagacagggaaccttggtcttctccaaatttattgtttcacttggagaaaaatcaatattacattccctctcagcgtgatcacttcctgcatcttccggaaatgattattcattatttggttctctacaatattgggatgattgcgagatatgaaacggagtggtggtatgaactgctgacacagcatgtcagtgatgattatgtgatgatccgacggttcttagaggtcacggaacgcaaatttccgtattacgtttctaaattcctgaagcaatacttgtaaacaaaaaaggcagctcatgatgagctgcctttaccgtaatgatagcttggcggcgtcctactctcacagggggaaacccccgactaccatcggcgctgaagagcttaacttccgtgttcggcatgggaacgggtgtgacctcttcgctatcgccaccaaaccattgagagtgttctctcaaaactagataacaataagtatacattcaaattggttaagtcctcgatcgattagtatctgtcagctccatgtgtcgccacacttccacctcagacctatcaacctgatcatctttcagggatcttacttccttgcggaatgggaaatctcatcttgaggggggcttcatgcttagatgctttcagcacttatcccgtccgcacatagctacccagcgatgcccttggcagaacaactggtacaccagcggtgcgtccatcccggtcctctcgtactaaggacagctcctctcaaatttcctgcgcccgcgacggatagggaccgaactgtctcacgacgttctgaacccagctcgcgtaccgctttaatgggcgaacagcccaacccttgggaccgactacagccccaggatgcgatgagccgacatcgaggtgccaaacctccccgtcgatgtggactcttgggggagataagcctgttatccccggggtagcttttatccgttgagcgatggcccttccatgcggaaccaccggatcactaagcccgactttcgtccctgctcgacttgtaggtctcgcagtcaagctcccttgtgcctttacactctgcgaatgatttccaaccattctgagggaacctttgggcgcctccgttaccttttaggaggcgaccgccccagtcaaactgcccacctgacactgtctccccgcccgataagggcggcgggttagaaggtcaatacagccagggtagtatcccaccgatgcctccaccgaagctggcgctccggtttccaaggctcctacctatcctgtacaagctgtaccaacattcaatatcaggctgcagtaaagctccacggggtctttccgtcctgtcgcgggtaacctgcatcttcacaggtactataatttcaccgagtctctcgttgagacagtgcccagatcgttgcgcctttcgtgcgggtcggaacttacccgacaaggaatttcgctaccttaggaccgttatagttacggccgccgtttactggggcttcaattcgcaccttcgcttacgctaagcgctcctcttaaccttccagcaccgggcaggcgtcagcccctatacttcgccttacggcttcgcagagacctgtgtttttgctaaacagtcgcctgggcctattcactgcggctctctcgggcttgcaccctaacagagcaccccttctcccgaagttacggggtcattttgccgagttccttaacgagagttctctcgatcaccttaggattctctcctcgcctacctgtgtcggtttgcggtacgggcacctctcacctcgctagaggcttttcttggcagtgtggaatcaggaacttcgctactataattcgctcgccatcacagctcagccttcacgggaaacggatttgcctatttcccagcctaactgcttggacgcggatatccaataccgcgcttaccctatcctcctgcgtccccccattgctcaaatggtgaggaggtggtacaggaatatcaacctgttatccatcgcctacgcctttcggcctcggcttaggtcccgactaaccctgagcggacgagccttcctcaggaaaccttaggcattcggtggaggggattctcacccctctttcgctactcataccggcattctcacttctaagcgctccacaagtccttccggtcttgcttcacagcccttagaacgctctcctaccactgttcgaagaacagtccgcagcttcggtgatacgtttagccccggtacattttcggcgcagagtcactcgaccagtgagctattacgcactctttaaatggtggctgcttctaagccaacatcctggttgtctaagcaactccacatccttttccacttaacgtatactttgggaccttagctggcggtctgggctgtttccctttcgactacggatcttatcactcgcagtctgactcccaaggataagtcatcggcattcggagtttgactgaattcggtaacccggtaggggcccctagtccaatcagtgctctacctccgagactcttaccttgaggctagccctaaagctatttcggagagaaccagctatctccaggttcgattggcatttcacccctacccacacctcatccccgcacttttcaacgtgcgtgggttcgggcctccattcagtgttacctgaacttcaccctggacatgggtagatcacctggtttcgggtctacgaccacgtactcaattcgccctattcagactcgctttcgctgcggctccgcatcttctgcttaaccttgcacgggatcgtaactcgccggttcattctacaaaaggcacgccatcacccgttaacgggctctgactacttgtaggcacacggtttcaggatctctttcactccccttccggggtgcttttcacctttccctcacggtactggttcactatcggtcactagggagtatttagccttgggagatggtcctcccggattccgacggaatttcacgtgttccgccgtactcaggatccactcaggagagaacgaagttttgactacagggctgttacctcctatggcgggcctttccagacctcttcatctacctcgttcctttgtaactccgtacagagtgtcctacaaccccaagaggcaagcctcttggtttgggctggtcccgtttcgctcgccgctactcagggaatcgcatttgctttctcttcctccgggtacttagatgtttcagttccccgggtctgccttctcatatcctatgtattcagatatggataccactccattacgagtggtgggtttccccattcggaaatctccggatcaaagcttgcttacagctccccgaagcatatcggtgttcgtcccgtccttcatcggctcctagtgccaaggcatccaccgtgcgccctttctaacttaaccgttaaaaagaatcactacgtgatatcttgcattactaattgaatgtgaattacttctgttatctagttttcaaagaacacgttggtggagcctagcgggatcgaaccgctgacctcctgcgtgcaaagcaggcgctctcccagctgagctaaggccccgtattgggtaaagatggtgggcctgagtggactcgaaccaccgacctcacgcttatcaggcgtgcgctctaaccagctgagctacaggcccatctaccatatgaaagaatcaaagttccttcaaaactaaacaagacagggaacgttctgtttataagacccaaggtcttatattccgttaaaatccttagaaaggaggtgatccagccgcaccttccgatacggctaccttgttacgacttcaccccaatcatctgtcccaccttcggcggctggctccataaaggttacctcaccgacttcgggtgttacaaactctcgtggtgtgacgggcggtgtgtacaaggcccgggaacgtattcaccgcggcatgctgatccgcgattactagcgattccagcttcacgcagtcgagttgcagactgcgatccgaactgagaacagatttgtgggattggcttaacctcgcggtttcgctgccctttgttctgtccattgtagcacgtgtgtagcccaggtcataaggggcatgatgatttgacgtcatccccaccttcctccggtttgtcaccggcagtcaccttagagtgcccaactgaatgctggcaactaagatcaagggttgcgctcgttgcgggacttaacccaacatctcacgacacgagctgacgacaaccatgcaccacctgtcactctgcccccgaaggggacgtcctatctctaggattgtcagaggatgtcaagacctggtaaggttcttcgcgttgcttcgaattaaaccacatgctccaccgcttgtgcgggcccccgtcaattcctttgagtttcagtcttgcgaccgtactccccaggcggagtgcttaatgcgttagctgcagcactaaggggcggaaaccccctaacacttagcactcatcgtttacggcgtggactaccagggtatctaatcctgttcgctccccacgctttcgctcctcagcgtcagttacagaccagagagtcgccttcgccactggtgttcctccacatctctacgcatttcaccgctacacgtggaattccactctcctcttctgcactcaagttccccagtttccaatgaccctccccggttgagccgggggctttcacatcagacttaagaaaccgcctgcgagccctttacgcccaataattccggacaacgcttgccacctacgtattaccgcggctgctggcacgtagttagccgtggctttctggttaggtaccgtcaaggtgccgccctatttgaacggcacttgttcttccctaacaacagagctttacgatccgaaaaccttcatcactcacgcggcgttgctccgtcagactttcgtccattgcggaagattccctactgctgcctcccgtaggagtctgggccgtgtctcagtcccagtgtggccgatcaccctctcaggtcggctacgcatcgtcgccttggtgagccgttacctcaccaactagctaatgcgccgcgggtccatctgtaagtggtagccgaagccaccttttatgtctgaaccatgcggttcaaacaaccatccggtattagccccggtttcccggagttatcccagtcttacaggcaggttacccacgtgttactcacccgtccgccgctaacatcagggagcaagctcccatctgtccgctcgacttgcatgtattaggcacgccgccagcgttcgtcctgagccaggatcaaactctccgataaagtagtttgactgactacgcacatcgctgtgcgatttatttaaaactttgaattaacaggtacgttttgtcttgtttagttttcaaagaacttttccgcccctctcgaagcgacctcttaatcataacattttcagtttgctaggtcaatacttttttaaaaaatattttcgctaggcttgcctttctattaaaaagacaacaaaaagaattatatcagcatcatcaccatgtgtcaaagcttttttttatttctttatatagtaaaagcgcagcctgttgcagctgcgctttttcgtttatacttcttccgtttcttccggctcttcttcattcttttcgacaagcgccacagtggctacatgctcttgatcagacatgcggatcagacggacgccttgtgttacgcgtcccgtagtggagatatcattaatatccattctgattaacacgccgcttgccgtaataatcattaagtcctcttcgccttttgttgctttcacagttactaacggaccgttgctgtcagtgattttacatgttttaaggccttttccgccccggctttgaactctgtattctgaagccggtgtgcgtttgccgtagccgttttctgtcactatgaggacatgggagtcttcttcaagaatctccatgcctacaacgacatcatcgtctgtcagcgtgatacctttaacacccgcagctgtgcgtcccatttgtcttacatcttcttcagggaaacggatcagcaaaccgttcttcgttccgatgatgatttgtttcttgccgtcagtcaggcggacggccatcagttcatcgtcttcccggagacctagggcgatcagaccgttattccgtatattcgcaaactgggacagtgccgtacgtttcgacaccccttgtttggtcgtaaagaagaggtattgctcctcatcaaacgtgctgaccggaataatggcattaatccattcgcctttttcaacttccagaaggttaataatcggaatgccttttgccgtacggccgtattcagggatttcatatcctttagaacggtataccttccctttattagagaagaacagaatcgtatcgtgcgttgatgtggaaattaagtgttccacaaagtcatcttcattcgttcccattccctgtacgccttttccgccccgtttttggctgcggtatgtggacgccgggagacgtttaacatagccgttatgggtcagtgtgatgacgatattttctctctcgataagatcttcatcttcaattgtttcaagaccggacgtcacgatttcagtgcgtctctcatcattgaaacgctctttgatttcattaagttcttcacggatgatctcaagaactctttcttcattggctaaaatatctttcagctcagcgataagcgcaacaagtgattgatattcctcttcaatcttttcgcgctccagaccggttaatcgctgaaggcgcatatccagaatagcttgcgcttgtttttcagtcagtgagaattgttcgatcaaacccgttctcgcaatttcagccgtctgggaattgcggataagagaaataacggcatctaaatgatcgagagcaattcttaaaccttccagaatgtgagctcttgcttccgctttgcggagttcgtaagccgttctgcgccggatcacaaccttttggtgatcaagataatgctccagacattgtttcaggcttagtaccttcggctgtccgtcaacgagcgccagcagattgattccgaaagacgtctgcagggccgtttgtttgtacaggttattcaaaatgacgtgagcattggcgtcacggcggatctcaatgacgattctcattccgttacggtcggattcgtctcgcagatcggtaattccttcgatttttttgtctcggacaagatccgcgattttttcaattaatctcgctttgttcacctgataaggaagttccgtgacaataattctttcttttcccgatgaagtctcttcgatttcagccttagcccggatcgtgattgatccccgtccggattcatatgccttgcggatgccgctccggcccaaaatctgacctgcagtcggaaaatccgggcccgggatgtattccatcagctcctggtttgtaatctcaggattctcacttacggcaagcacgccttcaatgacttccccaagctgatgcgggggaatgtttgtcgccattccgaccgcaataccggcagccccgtttacgagcagattcggaaatctcgaaggcatgacggcaggctctctttctgaaccgtcatagttatcttgatagtcaatcgtgtctttcgtaatgtcacgcagaatttccattgcgatttttgacattctcgcttctgtgtaacgcatcgcggccgctgagtcgccgtcaaccgaaccgaagttgccgtgtccgtcaacaagcatgtagcggtagttaaaatcctgcgccattctgaccattgattcgtaaaccgctgagtcaccgtgcgggtggtacttaccgataacttcaccgacgatacgggcagattttttatatggtttgtcactggtcatgcctaaatcattcattgcgtacaaaatccgtctgtgaaccggcttcagaccgtcacgcacatccggaagcgcccgggatacgataacgctcattgcatagtccaggaaggatgtccgcatttcctgactgatattgacttcacgtacttgtggtgtgttttgttcactcattaaaaaaacctccctgaagtatcacatgaaataatgtgggagtagattgtccattatgatcttcaatacgatttcactattctccattatatcaataaacttgtgtttatacacattaatttagtagaatatacgggttttgcgggttttcagaggctttagaagccgctttgagaaaaaagccttatttcttaacgaaaataaggctttcttggttaaatatcaagatttttcacgtatctggcgtttgcttctatgaagtttctccgcggttctactttgtcacccatcagcatttcaaaagtctcgtcagcgtccattgcatcttcaagattgacttgcagaagcgttctggtcgcagggtccattgtcgtttcccaaagctgagtcgcgttcatttctccaagacctttataacgctggaggccgggcttaggtgattgcggaagctcttttaacagctcatcaagctgcttatcgttataagcgtattccacccgttttccctgctgcactttataaagcggcggctgggcaatgtagacatagccgttttcgatgatttcccgcatgtatctgtagaagaacgttaataaaagcgttctgatatgggcgccgtcaacatcggcatccgtcatgatgaccactttatgataacgcgctttttcaagattaaaatcttctccgattcctgttccgagggccgtgatcattgatctgacctcattgtttgagagaatcttatcaagtctggctttctcaacgttcagaatcttaccgcgcagcggcagaatggcttggaaatgacggtcccgtccctgtttcgctgatccgcccgcagagtcaccctctacgatatacagctcggaaatgctcggatctttagaagaacagtccgccagtttgcccggcagattggaaatctcaagcgcacttttgcgccgggtcaattcccgggcttttttcgccgccatccgcgctcttgcggccattaaacctttttcaacgattttgcgggctgagtccggattttcaagaaggaatgtttccagcgcagaagaaaacagcgtatcagtgatcgttctcgcttcggagttgccgagcttggttttcgtctgcccttcgaattgcggatcagggtgcttaattgaaataatggcagtcagcccttctctcacatcatccccgcttaaattcggatcattttctttgaaaatcccttttcttcttgcatagtcgtttatgacacgggtcagaccggttttaaatccggcctcgtgcgtgccgccttcgtatgtgttgatattatttgtgaaagaataaatattgcttgtatagctgtcgttgtattgcaatgcaacttcaaccgttatgccgtctttctcgccttcgatataaatcggctcttcatgaacgacttctttggaacggtttaagtactcaacatagcttttgattccgccttcgtagtggtactcgtttttccgttcttgtccttcacgtttgtcttcaatcgtgatgtttacgccttttgtcaggaaggccaattcccggacacggtttgaaagcagatcatagtcatatacagttgtttctttgaaaatttccgggtccggaacgaagtgcgtaatcgttccggtcttatcagtttcgccgatcacttcaagatcggccacaggtacaccgcgctcgtacgcctgataatggatttttccgtcacgatgaaccgtaacgtcaagagtggtcgacaaggcgtttacgacggatgcccctacaccgtgaagaccgccggatactttatatccgcttccgtcaaatttaccgccggcgtggagaacggtcatgatgacttcaaccgcagggcggcccatcttctcctggataccgaccggaattccgcgcccgttgtccttaacggtaatgctgttatctttttcaatctcgatgttaatatctgtacaataaccggccagggcttcgtcaatactgttgtcgacgatttcccacaccaaatggtgaaggcctttgctgttagttgatccgatgtacatccccggtctctttcgaacagcttccaaaccttctaatacctgtatctgattctcatcataactattttgctgctgttccatagccatgcacattcacctacacttttcttaaacgataatatattcattgtaaagatccgctaagaatctatttctaacataaattgcgcacgtttcttcagtgtgccggaagataagggagagtaatatatattctcagtcgtgactacgatagactttggcgtgccgtttacggacggcactactttttctttctgtctgtccagaaattcttcaacgatcggcgatacattgaccttgcagtcaaaaatgccgacgatatcgcgggttgaaacgacaaagtcgtcacctaaatgaatatacaatcgctcacctcatttcttcacttcactaacgcaccgttttccacacggaacattcctgcttgatgtaaggtatcgtggtcaatgccatccacgctcgtcgtggtgacaaatgtctgcacacggccttggatcgtatgaagcaaatgggactgtcggtaatcatccagctcgcttagtacatcatccaaaagtaaaatggggtattctccgatttcttcatgaatcaaatctatttcagccagctttagagacaaagccgtcgtacgctgctgtccctgcgaaccgtaagtctgcacatcgcgtccgttcacataaaaaaggacatcatcccgatgcggtccgaataatgtgacgcctcgttctatttctttttcttttaatttcgaaaaagactcctggtagctgttacctattttcgacaaatctttgggatctgatacatcaagcgccgtgtgatacttaagcgtcagttcttcaagtccccgggaaatgccggaatggatcggctgcgcccatttttcaagctgcgccgtaaactgcagacgtctggcgacaacttttgcggctgcttcaatcagctgatcagtgagaacgtcaagcatggtccggtcagtctgtttccggctttgcagctgtttcagaaaatgattccgctgtgaaaggattttttgataaagagataaatcatacagataaacggcagaaacctgcccgatctccatatcgagaaatcttctcctcacctgagggcttcctttgacgagatttaaatcctcaggggcaaacataatggtgttcagcgctccgacatactgactgagtttttgctgctctatatgattgaccttgccctttttaccttttttggagatgacaagctgcatcgggatgtccccgttgcgcttcatcactcttccttctattttagcatagtcttcgtcccaccgtataagttctttgtcatttgaggtgcggtgtgattttgccatcgaaaggacatagatggcttccatcagattggttttgccctgggcattttccccgatgatcacattcaccttgttttcgaattgaagctcagcgcgctcataattacggtaggatgttaattctaaattttggatatacaaccgctgtcacccgctttaattgacgacttgaaatgaaccaaatccttcaatcgcgaccacgtctccaacgtaaagctttctgccgcggcgattgtcaggttcattgttgacagtcacctcatgctcgctcagaaaccacttcgccatgccgccggactgaatcacatcagctaattttaaaaactggccaagcgtaatcatttctgtatcaatcgaaatcggatttgccataatatcgacctctttcaaatatcactaatatctaattgtactaaaaaatcctgaaataaggaaagggaaaacttgagggagcggctgatgaatagaaaagctgccgaactaagccggcagcacattctgtttgattaatacgttctgaccggaaggatgagctgaacgatggtctcatcattcggcgtacggataagaaacggtctcatcgctcccgtaaagctgatacggatgtccgctccttcaagtactttcagtgcgtccatcatatattttggactgaatgaaatatttaattcctcgccgtcaatcttgtctgccagcacagcttcgaccactttcccgatttccggagaatttgatgaaatctcaagcgaatccgccggtttggcagaaagttttacaacgttgttgcggccttctctcgccaataaagaagcacggtctatcgcctgtaaaaattccttcgtgttcacgacgatttccgttttgctttcctgcggaattaagctggtcgtgtccggatagtttccgtcaagcaatcttgagaagaacaatacgtttttcgctttgaacagaacttgggtttctgtaatgacgatatccaccagctcttggctgtcatcaagaattttgcttagctcggttaagcttttcccgggaatgaccacgttataagtactgtcttccggaatatcaagcttcgcctttcttaaagcgagtcggtggctatccgtggcagtgcataataattcaccgttttcaactttccagtttacacctgtcaagatggggcgtgtttctgaggcggacacagcgaacacggtttggcggatcaggtttttcaaaagatccgtcggaatctgaatggcgtgatgctcttcgatttgcggtagatgcggatattcatctgcatcaaggccgtttaaattaaattcggcttttccggaacggataatcgttaaatattgattttgaacttcgatttcaacagtcgccatcggcagttttttaacgatttcgctgaagaaacgcgcttgcagcacgatacttcccggctgatcgatcgtcacgatttctttatcatcatcttctttcggaatgaatgactcaattgaaatatcagagtcacttcctgtgaaagatactccttcatctgaggcgacgatcttaataccggtgagaatgggaattgtggttctggatgaaacggcttttagaacgtcttgtacactttcgactaaccgatctttttgaatcgtaaatttcatgtttatcctcctaacggataatataattaatatatttttaaaaatagcagtagtaatagtagggcctgtggatttgtggataagttgtgaaaaagacaggaaacacagcctatccacatgtggacagactgtgtatggctatgaaaaagttattcacactttccccgattcatccgaggacactattatttaagcagttcttttatttctttcacctgctgctgaagctgctcgtcatcaatcagcagttttgaaatcttttcgtgggcgtgaatgacggttgtatggtctctcccgccaaattcttccccgattttaggcaaagaagaatccgtcatttctcttgaaa
